United States Patent Application Publication US 2026/0297605 A1, published October 1, 2026 (application 19/477,584).

The application's sequence listing, which the Patent Office published only in electronic form, follows.

SEQUENCE LISTING (714 sequences)

SEQ ID NO: 1 - DNA, 134 bp, Tobacco mosaic virus
  source 1..134: mol_type = other DNA
taggtttgagagagaagattacaaacgtgagagacggagggcccatggaacttacagaagaagtcgttgatgagttcatggaagatgtccctatgtcgatcaggcttgcaaagtttcgatctcgaaccggaaaa

SEQ ID NO: 2 - DNA, 198 bp, Tobacco mild green mosaic virus
  source 1..198: mol_type = other DNA
aaggtttgagggaacgtattttgagtgtgacagacggctcgccaattgaactcactgaaaaggttgttgaggagttcgtggatgaagtaccaatggctgtgaaactcgaaaaggttccggaaaacaaaaaagaaatggtaggtaataatgttaataataagaaaataaataacagtggtaagaagggttttaaaattg

SEQ ID NO: 3 - DNA, 133 bp, Tomato mosaic virus
  source 1..133: mol_type = other DNA
tgggtttgagggagaaagtaacgagtgtgaacgatggaggacccatggaactttcagaagaagttgttgatgagttcatggagaatgttccaatgtcggttagactcgcaaagtttcgaaccaaatcctcaaa

SEQ ID NO: 4 - DNA, 134 bp, Pepper mild mottle virus
  source 1..134: mol_type = other DNA
taggcttgagagagaaaattactagtgtgtcagaaggaggacccgttgaacttacagaagcagtcgttgatgagttcatcgaatcagttccaatggctgacagattacgtaaatttcgcaatcaatctaagaaa

SEQ ID NO: 5 - DNA, 139 bp, Paprika mild mottle virus
  source 1..139: mol_type = other DNA
aaggtttacgagagaaagtgactacagtgtcagaggacagcgctattgaacttacagaggaagttgttgatgagttcatagaggcagtaccgatggcacgtcggttgcaaaatttcaggaaacccaaaaataatattag

SEQ ID NO: 6 - DNA, 134 bp, Bell pepper mottle virus
  source 1..134: mol_type = other DNA
tgggtttgagggagaagattacaagagtaaccgacgccgggcctatggaacttactgaagaagttgttgatgagttcatagagaatgtcccgatggcggcaaggcttgcaagatttcgaaccaaatcctcaaaa

SEQ ID NO: 7 - DNA, 138 bp, Tomato mottle mosaic virus
  source 1..138: mol_type = other DNA
tgggtttgagggagaagattacaagagtggatgacgcaggtcccattgaacttaccgaagaagttgttgatgagttcatggagagtgtgcctatgtcagtcaggcttgctaaatttcgaaccaaatcctcaaaaagag

SEQ ID NO: 8 - DNA, 135 bp, Odontoglossum ringspot virus
  source 1..135: mol_type = other DNA
tcggactgagagagaagattttgaacgtaacagaaggagggcccaccgaacttactgaagcagttgttgatagattcgtggagaaagttcctatggctgctaggctcaagtcttttcgctctgtcaacaaaaaga

SEQ ID NO: 9 - DNA, 201 bp, Obuda pepper virus
  source 1..201: mol_type = other DNA
agggtctaagagagaaggtgactgccgtgtccgaagacgacgctatagaactcacagaagaggttgttgatgagtttatagaagccgtaccgatggcgcgacgtttgcagaacttgagaaaacccaagtacaacaaagaaaaagaaaataaaaatttgaataataaaaatagtataggagtttccaaacctgtcggtttag

SEQ ID NO: 10 - DNA, 136 bp, Rehmannia mosaic virus
  source 1..136: mol_type = other DNA
tgggtttgagggagaaaatcacaactgtgaaagatggaggacccatggaactcaccgaagaagtggtagacgagttcatggaagacgttccaatgtctgtcagacttgcgaagtttcgatctcgaaccggaaaaaa

SEQ ID NO: 11 - DNA, 134 bp, Brugmansia mild mottle virus
  source 1..134: mol_type = other DNA
aaggattgcgtgaaaggatcacgaatgttgccgaaggcggttcacttgagctcactgaagaagttgttgagagctttgtgaatgacgtccctatggcagtacgactgaaccatttacgtaatggaaacaaaaaa

SEQ ID NO: 12 - DNA, 134 bp, Yellow tailflower mild mottle virus
  source 1..134: mol_type = other DNA
ccggtctgagagagaaagtaacttccgtgtcagaagggtctccgattgaactcacagaagatgttgtagatgagtttttcgagagtgtccctatggctcgtaggttgcagaacttgaggaataggcgaggaaat

SEQ ID NO: 13 - DNA, 137 bp, Tropical soda apple mosaic virus
  source 1..137: mol_type = other DNA
ttggactgagggagaaaattacaaatgtctcagacggaggacccgtcgaacttacagaagaagttgttgatgagttcgtcgaatcagttcctatggctgagagattacgtaaatttcgaggacggtccaacaaaaag

SEQ ID NO: 14 - DNA, 432 bp, Cucumber green mottle mosaic virus
  source 1..432: mol_type = other DNA
taccctcgtctgtcgtagatattaattctagattcccagatgcgggtttttacgctttcctcaacggtcctgtgttgaggcctatcttcgtttcgcttctcagctccacggatacgcgtaatagggtcattgaggttgtagatcctagcaatcctacgactgctgagtcgcttaacgctgtaaagcgtactgatgacgcgtctacagccgctagggccgagatagataatttaatagagtctatttctaagggttttgatgtttacgatagggcttcatttgaagccgcgttttcggtagtctggtcagaggctaccacctcgaaagcttagtttcgagggtcttctgatggtggtgcacaccaaagtgcatagtgctttcccgttcacttaaatcgaacggtttgctcattggtttgcggaaacctctcac

SEQ ID NO: 15 - DNA, 347 bp, Cucumber fruit mottle mosaic virus
  source 1..347: mol_type = other DNA
tttttgtccttattatgctttgtatgatctgttggtgtcagcccaaggtggagccctgcaaacgcaaaatggtaaagacattttgcgtgactccataaatgggttgttaacgacagttgcgtctcctaggagtcggttccctgcggaagggttctttgtctggtcccgtgagtcgcgcattgctgctatattagattctctgctttcggcgttggattcaagaaatagggctattgaagttgaaaacccttctaatccttcgaccagtgaagctttgaatgctactaagcgcaatgacgacgcgtctactgctgcgcacaacgacattcctcagctgatttcagctt

SEQ ID NO: 16 - DNA, 297 bp, Kyuri green mottle mosaic virus
  source 1..297: mol_type = other DNA
tgttaacttctgttgcgtctctcaattcacgttttcctgctaatgagtttttcgtgtggtctcgtgagtcgcgcattgctgccataatcgattcgttgttatccgctttggattctagaaatagggctatcgaagttgaaaacccttctaatccttctaccggagaagctctgaatgcgaccaagcgcaatgacgacgcgtctacagccgcgcacaacgacattcctctgcttttagcagctctgaatgacggtgtgggcgtttttgatagtgcgtcttttgagtcagctttcggtc

SEQ ID NO: 17 - DNA, 335 bp, Zucchini green mottle mosaic virus
  source 1..335: mol_type = other DNA
tgctgtcttctgttgcgtcacccacttcacagtttccttccggtgtgttttatgtgtggtctcgtgagtcgcgcattgctgctttgatcgattctctcttcggtgctttggattcaagaaatagggctattgaagttgaaaacccttctaatccatcgactggcgaagctttgaacgcggttaagcgcaatgacgacgcgtctacagccgctcacaacgacattcctcagattttatctgctctgaatgaaggtgcgggcgtttttgatagagcgtcttttgaatctgcttttggtctcgtgtggaccgcaggttcgtctacctcgtcttgaggc

SEQ ID NO: 18 - DNA, 238 bp, Cucumber mottle virus
  source 1..238: mol_type = other DNA
tcttttcctcgcccgtgagtcctaccgtcagatttcctgacggagttttttatgtgtttttaggtaatcctgttttggatccgctttttaaagctctgttacagtcgttggatacaagaaatagggtcatagaggttgataacccttctaatcctacgactgctgagtctttaaacgctgtccagcgtactgacgattctactgtcagttcgcgtgtgggtttaataaacttgcgtgc

SEQ ID NO: 19 - DNA, 238 bp, unidentified
  source 1..238: mol_type = other DNA
ttttcacctctcctgtgagtccgaccgttagatttcctgacggtccgtttttcattttcttagggaatcctgtgttggatccgctttttaaagctcttctgcagtcgctggatacaagaaatagggttattgaggttgacaatccttctaatcctactactgcggaatctttgaacgcgattcagcgtactgacgactcttccgtcagttcgcatgtcggtctagttaaccttcgcgc

SEQ ID NO: 20 - DNA, 246 bp, Turnip vein-clearing virus
  source 1..246: mol_type = other DNA
agggtttgagggaaaaggtcgtcgcaataaatgatccggacgtcgaaggtttcgaaggtgtggttgacgaattcgtcgattcggttgcagcatttaaagcggttgacaatttcaggaagaggaaaaagaaggttgaagaaagggatgtagtaagtaagtataaatatagaccggagaaatacgccggtcctgattcgtttaatttaaaagaagaaaatgtcttacaacattacaaacccgaatcag

SEQ ID NO: 21 - DNA, 246 bp, Ribgrass mosaic virus
  source 1..246: mol_type = other DNA
agggtttgagagaaaagatcatcgcgataagtgatccggacgtcgaaggtttcgaaggagtggttgacgatttcgttgattcggtcgaagcatttagagcggttgataatttcaggaaaaagaaaaggaagataggagaaaaggaagcggtaagtaggaataagtacagaccggagaaacacgccggtcctaattcgttatatattaaagaagaaaatgtcttacaacatcacgagctcgaatcag

SEQ ID NO: 22 - DNA, 246 bp, Wasabi mottle virus
  source 1..246: mol_type = other DNA
agggtttaagagaaagagtcatcgctgtagatgatccgaacgttgagggtttcgaaggtgtagttgacgaattcatcgattcggttgcagcatttaaagcggttgacaatttcaggaaaaagaaaaggaagattggaggaagggatgtgattagtaagtataagtatagaccagagaagtacgccggtcctgattcgttacttaataaagaagaaaatgtcatacaacatcacgaactcgaatcag

SEQ ID NO: 23 - DNA, 249 bp, Youcai mosaic virus
  source 1..249: mol_type = other DNA
aaggtttgagggaaaaagtcatcgctgtgaatgatccgaacgtcgaaggtttcgaaggtgtggttgacgatttcgtcgattcggttgctgcattcaaggcgattgacagtttcaggaagaaaaagaaaaggattggaggaagggatgtaaatagtaataagtatagatatagaccggagagatacgccggtcctgattcgttacaatataaagaagaaaatggtttacaacatcacgagctcgaatcag

SEQ ID NO: 24 - DNA, 258 bp, Streptocarpus flower break virus
  source 1..258: mol_type = other DNA
agggtttgcgtgaaaggcttaataatgtgggagatccaaatgttgaagtttcagaagttgtcgttgatgagttcgtggactcgatttccgcttcacagtcgttaagccgtgctcgtaataaatacgttcgtggtaatggtaaggttgggaataatagtggtggttttagtaagtataatcgtcatcagccggagaggttcgccggcaaggctatgtataattctaaaaatgtcgtacgtggtggtacttccgaaccaa

SEQ ID NO: 25 - DNA, 333 bp, Rattail cactus necrosis-associated virus
  source 1..333: mol_type = other DNA
tgcttttatgacaggatcttacccaacaattcgactgtgctcaacgactatgacagtttcaccttgagagtgagagacattcatctcaacttggacgattgtagactcgacctgtcaaaggacgatccagcaatctgtcggaggcagtcgggttatctgcgtcccgttcttagaaccggtacggagagacctcgacagcccgggctcattgagaatgtcttagctcttatcaagagaaatttcaatgcacctcatcttcttggaactgtagacgtcgatgcaatggccgacaccgtagtggataagttttttaaaattttcttccctgatggt

SEQ ID NO: 26 - protein, 159 aa, Tobacco mosaic virus
MSYSITTPSQFVFLSSAWADPIELINLCTNALGNQFQTQQARTVVQRQFSEVWKPSPQVTVRFPDSDFKVYRYNAVLDPLVTALLGAFDTRNRIIEVENQANPTTAETLDATRRVDDATVAIRSAINNLIVELIRGTGSYNRSSFESSSGLVWTSGPAT

SEQ ID NO: 27 - protein, 159 aa, Tobacco mild green mosaic virus
MPYTINSPSQFVYLSSAYADPVQLINLCTNALGNQFQTQQARTTVQQQFADAWKPVPSMTVRFPASDFYVYRYNSTLDPLITALLNSFDTRNRIIEVDNQPAPNTTEIVNATQRVDDATVAIRASINNLANELVRGTGMFNQAGFETASGLVWTTTPAT

SEQ ID NO: 28 - protein, 159 aa, Tomato mosaic virus
MSYSITSPSQFVFLSSVWADPIELLNVCTNSLGNQFQTQQARTTVQQQFSEVWKPFPQSTVRFPGDVYKVYRYNAVLDPLITALLGAFDTRNRIIEVENQQSPTTAETLDATRRVDDATVAIRSAINNLVNELVRGTGLYNQNTFESMSGLVWTSAPAS

SEQ ID NO: 29 - protein, 157 aa, Pepper mild mottle virus
MAYTVSSANQLVYLGSVWADPLELQNLCTSALGNQFQTQQARTTVQQQFSDVWKTIPTATVRFPATGFKVFRYNAVLDSLVSALLGAFDTRNRIIEVENPQNPTTAETLDATRRVDDATVAIRASISNLMNELVRGTGMYNQALFESASGLTWATTP

SEQ ID NO: 30 - protein, 161 aa, Paprika mild mottle virus
MPYTVSSPNQLVYFGSVWADPIALIDLCTVSLGNQFQTQNARTTVQQQFSDLFKTVPTRTIRFSDGENGFRVFRYNSTLDPLITALLNSFDTRNRIIETENPANPNTAEIASATQRVDDATVSIRACINNLMNELARGTGMLNTASFETVSNLTWTTAATT

SEQ ID NO: 31 - protein, 160 aa, Bell pepper mottle virus
MSYTVNSPSQLVYLSSAWADPTDLLNLCTNSLGNQFQTQQARTTVQQQFSDVWKPTPQAGVRFPASGFKVYRYNAVLDPLITALLGTFDTRNRIIEVENQQNPTTAETLDATRRVDDATVAIRSAINNLANELVRGTGMYNQTSFESMAGLTWTTTPPSG

SEQ ID NO: 32 - protein, 159 aa, Tomato mottle mosaic virus [sequence omitted]

SEQ ID NO: 33 - protein, 158 aa, Odontoglossum ringspot virus
MSYTITDPSKLAYLSSAWADPNSLINLCTNSLGNQFQTQQARTTVQQQFADVWQPVPTLTSRFPAGAGHFRVYRYELILEPLITFLMGTFDTRNRIIEVRNPQNPTTTETLDATRRVDDATVAIRSAINNLLNELVRGNGMYNQVSFETMSGLTWTSS

SEQ ID NO: 34 - protein, 161 aa, Obuda pepper virus
MPYTVTSPSQLVYFGSVWADPITFIDLCTVALGNQFQTQNARTTVQQQFSDLFKTVPTRTNRFNDGENGFRVFRYNSTLDPLISALMNSFDTRNRIIEVDNPANPNTSEVASATQRVDDATVNIRACINNLMNELVRGTGMMNTASFETVSNLTWTTTTTT

SEQ ID NO: 35 - protein, 159 aa, Rehmannia mosaic virus
MSYTIATPSQFVYLSSAWADPVELINLCTNALGNQFQTQQARTVVQRQFSEVWKPSPQVTVRFPANDFKVYRYNAVLDPLVTALLGAFDTRNRIIEVENQANPTTAETLDATRRVDDATVAIRSAINNLVVELIRGTGSYNRSAFESSSGLVWTSGPAT

SEQ ID NO: 36 - protein, 159 aa, Brugmansia mild mottle virus
MAYTITAPNQIVYLGVAYADPILLMNLCTTSQGNQFQTQNARTTVQQQFADIWKAVPAVNIRFPENGFLVYRYNAVLDQLVTSLLNSFDTRNRIIEVENPPNPTNGEIMSATQRVDDATVNIRASITNLMNELVRGTGFLNRSSFESTSGLTWSTAPTT

SEQ ID NO: 37 - protein, 158 aa, Yellow tailflower mild mottle virus
MSYAITSPKQFAYLTNAYADPIALISLCNNALGNQFQTQNARTTVQQQFNDIWKELPTQISRFPVGIYRVYRFDSTIDPLITSVLNSFDTRNRIIETENPANPSTTEVVNATQRVDDATVNIRSSINNLCNELIRGTGFLNQATFEEASQLTWTARTT

SEQ ID NO: 38 - protein, 160 aa, Tropical soda apple mosaic virus
MSYTISNPNQLVYLASVWADPTELLNLCTSALGNQFQTQQARTTVQQQFSDVWKTVPATNIRFPNAGFKVYRYNAVLDSLITALLGSFDTRNRIIEVENPQNPTTAETLDATRRVDDATVAIRSSINNLMNELVRGTGMYNQAQFESVSGLTWATTATSS

SEQ ID NO: 39 - protein, 161 aa, Cucumber green mottle mosaic virus
MAYNPITPSKLIAFSASYVPVRTLLNFLVASQGTAFQTQAGRDSFRESLSALPSSVVDINSRFPDAGFYAFLNGPVLRPIFVSLLSSTDTRNRVIEVVDPSNPTTAESLNAVKRTDDASTAARAEIDNLIESISKGFDVYDRASFEAAFSVVWSEATTSKA

SEQ ID NO: 40 - protein, 162 aa, Cucumber fruit mottle mosaic virus
MSYSTSGLRSLPAYTKSFCPYYALYDLLVSAQGGALQTQNGKDILRDSINGLLTTVASPRSRFPAEGFFVWSRESRIAAILDSLLSALDSRNRAIEVENPSNPSTSEALNATKRNDDASTAAHNDIPQLISALNDGAGVFDRASFESQFGLVWTAASSSTSK

SEQ ID NO: 41 - protein, 161 aa, Kyuri green mottle mosaic virus
MSYSTSGIRSLPAFAKSFYPFYDVYNLLVSAQGGALQTQNGKDILRESLTGLLTSVASLNSRFPANEFFVWSRESRIAAIIDSLLSALDSRNRAIEVENPSNPSTGEALNATKRNDDASTAAHNDIPLLLAALNDGVGVFDSASFESAFGLTWTASATSSK

SEQ ID NO: 42 - protein, 161 aa, Zucchini green mottle mosaic virus
MPYSTSGIRSLPAFSKSFFPYLELYNLLITNQGAALQTQNGKDILRESLVGLLSSVASPTSQFPSGVFYVWSRESRIAALIDSLFGALDSRNRAIEVENPSNPSTGEALNAVKRNDDASTAAHNDIPQILSALNEGAGVFDRASFESAFGLVWTAGSSTSS

SEQ ID NO: 43 - protein, 162 aa, Cucumber mottle virus
MAYSPITPTNLSLFSSNYVPFTEFYNYLVTAQGEAFQTQQGRDSVRDSLSGFFSSPVSPTVRFPDGVFYVFLGNPVLDPLFKALLQSLDTRNRVIEVDNPSNPTTAESLNAVQRTDDSTVSSRVGLINLRAAITQGNGVVNRSIFESSNGLTWATSGSSSSK

SEQ ID NO: 44 - protein, 162 aa, unidentified
MAYTPITPTNLPLFSSNYVPYTEFYNYLVSAQGEAFQTQQGRDAVRTTLSGFFTSPVSPTVRFPDGPFFIFLGNPVLDPLFKALLQSLDTRNRVIEVDNPSNPTTAESLNAIQRTDDSSVSSHVGLVNLRAAIAQGNGVVNRSIFESSSGLTWATSSASTSK

SEQ ID NO: 45 - protein, 157 aa, Turnip vein-clearing virus
MSYNITNPNQYQYFAAVWAEPIPMLNQCMSALSQSYQTQAARDTVRQQFSNLLSAVVTPSQRFPDTGSRVYVNSAVIKPLYEALMKSFDTRNRIIETEEESRPSASEVANATQRVDDATVAIRSQIQLLLSELSNGHGYMNRAEFEALLPWTTAPAT

SEQ ID NO: 46 - protein, 157 aa, Ribgrass mosaic virus
MSYNITSSNQYQYFAAVWAEPTPMLNQCVSALSQSFQTQAGRDTVRQQFSNLLSAIVAPNQRFPDTGFRVYVNSAVIKPLYEALMKSFDTKNRIIETEEESRPSASEVANATQRVDDATVAIRSQIQLLLNELSNGHGYMNRAEFEAILPWTTAPAT

SEQ ID NO: 47 - protein, 157 aa, Wasabi mottle virus
MSYNITNSNQYQFFAAVWAEPIAMLNQCISALSQSYQTQAARDTVRQQFSNLLSAIVTPNQRFPETGYRVYVNSAVLKPLYEALMKSFDTRNRIIETEEESRPSASEVANATQRVDDATVAIRSQIQLLLSELSSGHGLMNRAEFEVLIPWATAPAK

SEQ ID NO: 48 - protein, 157 aa, Youcai mosaic virus
MVYNITSSNQYQYFAAMWAEPTAMLNQCVSALSQSYQTQAARDTVRQQFSNLLSAIVTPNQRFPEAGYRVYINSAVLKPLYESLMKSFDTRNRIIETEEESRPSASEVANATQRVDDATVAIRSQIQLLLNELSNGHGLMNRAEFEVLLPWATAPAT

SEQ ID NO: 49 - protein, 157 aa, Streptocarpus flower break virus
MSYVVVLPNQLQFFTNAWADPIQLMNLCSASLSQIFQTQAARDAVREQFGNTLRSVVTQTTRFPEAGFQVYINDAALKPLWENLLKSFDTKNRILETEEETRPSTAEVLNATQRVDDSTTAIRGALQRLSDELNRGSGYMNRTSFETILLWSAATAK

SEQ ID NO: 50 - protein, 170 aa, Rattail cactus necrosis-associated virus
MPYINVQPKDFVYLTRSWVDPQRLIQFLSDMQTQAFQAQQSRTQLLNELSTMVVYGPTKSDRFPIDTYLINITKGGLSAYWFGLTQSADTKDRVFEVSEARAVTNAESKLATQRVDDATVAIRNAIKSTLSYLIAGEDIYSRTSFEAALGWIWQENLPPPPQTAASDSRT

SEQ ID NO: 51 - protein, 268 aa, Tobacco mosaic virus
MALVVKGKVNINEFIDLTKMEKILPSMFTPVKSVMCSKVDKIMVHENESLSEVNLLKGVKLIDSGYVCLAGLVVTGEWNLPDNCRGGVSVCLVDKRMERADEATLGSYYTAAAKKRFQFKVVPNYAITTQDAMKNVWQVLVNIRNVKMSAGFCPLSLEFVSVCIVYRNNIKLGLREKITNVRDGGPMELTEEVVDEFMEDVPMSIRLAKFRSRTGKKSDVRKGKNSSNDRSVPNKNYRNVKDFGGMSFKKNNLIDDDSEATVAESDSF

SEQ ID NO: 52 - protein, 256 aa, Tobacco mild green mosaic virus
MAVSLRDTVKISEFIDLSKQDEILPAFMTKVKSVRISTVDKIMAVKNDSLSDVDLLKGVKLVKKGYVCLADLVVSGEWNLPDNCRGGVSVCIVDKRMKRSKEATLGAYHAPACKKNFSFKLIPNYSITSEDAEKHPWQVLVNIKGVAMEEGYCPLSLEFVSICVVHKNNVRKGLRERILSVTDGSPIELTEKVVEEFVDEVPMAVKLEKVPENKKEMVGNNVNNKKINNSGKKGFKIEEIEDNVSDDESIASSSTF

SEQ ID NO: 53 - protein, 264 aa, Tomato mosaic virus
MALVVKGKVNINEFIDLSKSEKLLPSMFTPVKSVMVSKVDKIMVHENESLSEVNLLKGVKLIEGGYVCLVGLVVSGEWNLPDNCRGGVSVCMVDKRMERADEATLGSYYTAAAKKRFQFKVVPNYGITTKDAEKNIWQVLVNIKNVKMSAGYCPLSLEFVSVCIVYKNNIKLGLREKVTSVNDGGPMELSEEVVDEFMENVPMSVRLAKFRTKSSKRGPKNNNNLGKGRSGGRSKPKSFDEVEKEFDNLIEDEAETSVADSDSY

SEQ ID NO: 54 - protein, 257 aa, Pepper mild mottle virus
MALVVKDDVKISEFINLSAAEKFLPAVMTSVKTVRISKVDKVIAMENDSLSDVNLLKGVKLVKDGYVCLAGLVVSGEWNLPDNCRGGVSVCLVDKRMQRDDEATLGSYRTSAAKKRFAFKLIPNYSITTADAERKVWQVLVNIRGVAMEKGFCPLSLEFVSVCIVHKSNIKLGLREKITSVSEGGPVELTEAVVDEFIESVPMADRLRKFRNQSKKGSNKYVGKRNDNKGLNKEGKLFDKVRIGQNSESSDAESSSF

SEQ ID NO: 55 - protein, 269 aa, Paprika mild mottle virus
MSSKSIVNIEEFINMSKAEEVLPAALTRMKSVRISTVDKIMATDNDNISEVDLLKGVKLIKNGYVCLVGLVVSGEWNLPDNCRGGVSVCLIDKRMQRHNEATLGSYTAKASKKNFSFKLIPNYSITSQDAERRPWEVMVNIRGVAMEEGWCPLSLEFVSVCIVHKNNVRKGLREKVTTVSEDSAIELTEEVVDEFIEAVPMARRLQNFRKPKNNISKNFVNKGSSKPRNIPKLNEDKVFKLEKGLKGVKGMTNASRDDSSSEISSDSFN

SEQ ID NO: 56 - protein, 278 aa, Bell pepper mottle virus
MAIVVKDKVNVNDFINLSNSEKYLPSNSEKYLPSLMTPVKSVRISKVDKVLARENETLSEVDLLKGVKLIEGGYICLAGLVVTGEWNLPDNCTGGVSVCLVDKRMERASEATLGSYYTGAAKKRFQFKVTPNYSVTTDDAKKNIWQVLVNIKGVRMSAGFCPLSLEFVSVCIVFKNNIKLGLREKITRVTDAGPMELTEEVVDEFIENVPMAARLARFRTKSSKTGPKKFVRNSRDSKVRSNNLNRGVRPKFEEEGIVSDKLINDESESIDADSDSYL

SEQ ID NO: 57 - protein, 268 aa, Tomato mottle mosaic virus
MALTVSGKVRISEFIDLSKSERLLPSMFTHVKSVSVSKVDKVMVNEEDSLSEVNLLKGVKLIDGGYVCLAGLVVSGEWNLPDNCRGGVSICLVDKRMQRADEATLGSYYTGAAKKRFQFKIVPNYAITTKDAERNIWQVLVNIRNVKMAGGFCPLSLEFVSVCIVYKNNIKLGLREKITRVDDAGPIELTEEVVDEFMESVPMSVRLAKFRTKSSKRGPKHNSNNTNERKGRSNFRKKQDQESYGVSDSLDNLIEDDTETSVAGSDSY

SEQ ID NO: 58 - protein, 303 aa, Odontoglossum ringspot virus
MGRLRFVVLLSIFPIKTFSEPCYTMALVLRDSIKISEFINLSAFEKLLPSALTAVKSVRIPKVDKIISYENDTLSDIDLLKGVKLVENGYVCLAGLVVTGEWNLPDNCKGGVSICLVDKRMKRANEATLGSYHTSACKKRFTFKIIPNYSVTTADALKGIWQVMTNIRGVEMEKGFCPLSLEFVSICVVYLNNIKLGLREKILNVTEGGPTELTEAVVDRFVEKVPMAARLKSFRSVNKKKPSNSSKFVNGKSRLNSRNKLNYENGDSDVGTSVVDDIVVGNGVSDIRIDDDCESFDAQSESY

SEQ ID NO: 59 - protein, 274 aa, Obuda pepper virus
MSKAIVKIDEFIKLSKSEEVLPSAFTRMKSVRVSTVDKIMAKENDNISEVDLLKGVKLVKNGYVCLVGLVVSGEWNLPDNCRGGVSICLIDKRMQRHNEATLGSYTTKASKKNFSFKLIPNYSITSQDAERRPWEVMVNIRGVAMSEGWCPLSLEFVSVCIVHKNNVRKGLREKVTAVSEDDAIELTEEVVDEFIEAVPMARRLQNLRKPKYNKEKENKNLNNKNSIGVSKPVGLERNKVRSVVRKGVRSDSSLGVTDMSQDGSSSEISSDSFI

SEQ ID NO: 60 - protein, 267 aa, Rehmannia mosaic virus
MALVVKGKVNIGEFIDLTKTEKLLPSMFTPVKSVMCSKVDKVMVHENESLSEVNLLKGVKLIENGYVCLAGLVVTGEWNLPDNCRGGVSVCLVDKRMERADEATLASYYTAAAKKRFQFKVVPNYAITTHDAMKNVWQVLVNIRNVKMSAGFCPLSLEFVSVCIVYRNNIKLGLREKITTVKDGGPMELTEEVVDEFMEDVPMSVRLAKFRSRTGKKNNVKKVKFEGVDRSVPKMNKGKSRNNGGVFERNIFIDNDSETNVAEPDSF

SEQ ID NO: 61 - protein, 271 aa, Brugmansia mild mottle virus
MTLSIRDSFKIDEFINLSKVEKAVPALFSRVKTVRVSTVDKIMATKNDSLSDVDLLKGVKLVNNGYVCLVGLVVSGEWNLPDNCKGGVSVCLVDKRMKRANEATLGSYHSRACKKNFSFKLIPNYSITTADAEKQPWQVLVNIRGVQMEQGYCPLSLEFVSVCIVHKNNVRKGLRERITNVAEGGSLELTEEVVESFVNDVPMAVRLNHLRNGNKKEGFSKGKYVNNNAKERSVNKFVKKSVNGKGGLKVKEISTSVEDYNSSEVSSDSFI

SEQ ID NO: 62 - protein, 266 aa, Yellow tailflower mild mottle virus
MAIALRDTVKINEFINLSKTEEILPAMFTRMKSVRISTVDKVVAKENDSVSEVDLLKGVKLVKNGYVNLVGLVVSGEWNLPDNCRGGVSVCLVDRRMTRHSEATLGSYTAPACKKNFSFKLIPNYSVTTADAERRPWEVMVNIKGVAMAEGWCPLTLEFVCVCIVHKTNVRTGLREKVTSVSEGSPIELTEDVVDEFFESVPMARRLQNLRNRRGNINRNKSQVYKKKNKNNIGDALKERIDEVKDVENKRYDNDDYSIEESSDSY

SEQ ID NO: 63 - protein, 256 aa, Tropical soda apple mosaic virus
MALVVKDDVKISEFINLSTSEKFLPAAMTSVKSVRVSKIDKVIATENDSLSDVDLLKGVKLIEEGYVCLAGLVVSGEWNLPDNCRGGVSVCLVDKRMLRHDEATLGSYKTGAAKKRFAFKLIPNYSVTTADAKRNIWQVLVNIKGVAMEKGFCPLSLEFVSVCIVHKTNIKLGLREKITNVSDGGPVELTEEVVDEFVESVPMAERLRKFRGRSNKKSNKFVEKNNNKRGDKGGKLLKKIDNETETESSDAESSSY

SEQ ID NO: 64 - protein, 264 aa, Cucumber green mottle mosaic virus
MSLSKVSVENSLKPEKFVKISWVDKLLPNYFSILKYLSITDFSVVKAQSYESLVPVKLLRGVDLTKHLYVTLLGVVVSGVWNVPESCRGGATVALVDTRMHSVAEGTICKFSAPATVREFSVRFIPNYPVVAADALRDPWSLFVRLSNVGIKDGFHPLTLEVACLVATTNSIIKKGLRASVVESVVSSDQSIVLDSLSEKVEPFFDKVPISAAVMARDPSYRSRSQSVGGRGKRHSKPPNRRLDSASEESSSVSFEDGLQSDHT

SEQ ID NO: 65 - protein, 258 aa, Cucumber fruit mottle mosaic virus
MSISKVGVRNALKPEEFVKITWVDKLLPDAFTILKYLSITDYSVVQSKDYEHLIPVDLLRGVDFSKSKYVTLVGVVISGVWTIPENCAGGATVALVDTRMSLVSEGTICKFSVSAASRDFTVKLIPNYYVTAADASSKPWSLFVRISGVRIKDGFSPLTLEIASLVATTNSILKKGLRVSVIESVVGSDASVSLDTLSEKVQPFFDSVPITASVVSRDRSYVSKGRPPSRSGPVSRKSKSKSEAESFSDSGASEPLSS

SEQ ID NO: 66 - protein, 262 aa, Kyuri green mottle mosaic virus
MSVSSVGVKNALKPQEFVKLSWVDKVLPDMFTVFRYLSVTDYSVIKSRDSECLIPVDLLRGVDLSKSKYVTLVGVVISGVWTIPENCAGGATVALVDTRMSMVDEGTICKFSVAASTRDFMVKLIPNYYVTASDASSKPWSIFVRVSGVRIKEGFSPLTLEIASLVATTNSILKKGLRVSVLESVVGSDASINLDSVSDKVQPFFDSVPITAAVIARDRSYVSKSGPSRAVRPRPQSKSGKKGDANPAESMSDGDAYEPPRL

SEQ ID NO: 67 - protein, 261 aa, Zucchini green mottle mosaic virus
MSVSKLGVKNVLKPQEFVKLNWVDKVLPDMFTVFRYLSVTDYSVIKSRDSECLIPVDLLRGVDLSKSKYVTLVGVVISGVWTIPENCAGGATVALVDTRMSMVDEGTICKFSVAASARDFMVKLIPNYYVTATDASSKPWSIFVRVSGVRIKEGFSPLTLEIASLVATTNSILKKGLRVSVLESVVGSDASVNLESASEKVQPFFDSVPITAAVISRDRSYVSKSGFNRAVRSKPPSKGGKKFGDSAESLSEDSASELPGL

SEQ ID NO: 68 - protein, 262 aa, Cucumber mottle virus
MSISNLSVESQLKPSNFVKLSWVDKLLPDYFSILRFLSVTDHSVIKAREYESFLPVELLRGVDLTKHKYVTLLGVVISGVWTIPEGCSGGATVGLVDTRMERVVEGTVCKFSVPASVREFNVRFIPNYSITAADAARHPWSLFVRLKGVNIKDSFSPLTLEIAALVATTNSIIKKSLKAIVSDVVVGSDAAVAIADRDSQVNSFFDSVPITKSVVNFDKSYKSRVPKKDSSGGSGKVKRSTGTSGPADTEFSDDGLLSNHSD

SEQ ID NO: 69 - protein, 262 aa, unidentified
MSISNLSVESQLKPSNFVKLSWVDRLLPDYFSILRFISVTDHSVVKAREYESFLPVELLRGVDLTKHKYVTLLGVVISGVWTIPEGCSGGATIGLVDTRMERVSEGTVCKFSVPASVREFNVRFIPNYSITASDAARHPWSLFVRLKGVSIKDSFSPLTLEIAALVATTNSIIKKSLKAVVSSVVVGSDAAVAIEDKDSSVNSFFDSVPITKSVINFDKSYKSKVPRKGSSVVSVKGKAGVGTSGPTDTEFSDYGLHSDHTD

SEQ ID NO: 70 - protein, 267 aa, Turnip vein-clearing virus
MSIVSYEPKVSDFLNLSKKEEILPKALTRLKTVSISTKDIISVKESETLCDIDLLINVPLDKYRYVGILGAVFTGEWLVPDFVKGGVTISVIDKRLVNSKECVIGTYRAAAKSKRFQFKLVPNYFVSTVDAKRKPWQVHVRIQDLKIEAGWQPLALEVVSVAMVTNNVVMKGLREKVVAINDPDVEGFEGVVDEFVDSVAAFKAVDNFRKRKKKVEERDVVSKYKYRPEKYAGPDSFNLKEENVLQHYKPESVPVLRSGVGRAHTNA

SEQ ID NO: 71 - protein, 267 aa, Ribgrass mosaic virus
MSMVSYEPKVNDFLFLTNKEKILPKALTRLKTVSISTKDIISVKESETLCDIDLLIDVPLDKYRYVGILGAVFTGEWLVPDFVKGGVTISVIDKRLVNSKECVIGTYRAAAKSKRFQFKLVPNYFVSTADAKRKPWQVHVRIQDVKIEAGWQPLALEVVSVAMVANNVVMKGLREKIIAISDPDVEGFEGVVDDFVDSVEAFRAVDNFRKKKRKIGEKEAVSRNKYRPEKHAGPNSLYIKEENVLQHHELESVPVLRSGVGRTHTNA

SEQ ID NO: 72 - protein, 267 aa, Wasabi mottle virus
MSTVSYKPKVSDFLSLSRTEEILPKALTRLKTVSVSTKDVISVKESESLCDIDLLVNVPLDKFRYVGILGVVFTGEWLIPDFVKGGVTVSVIDKRLENSKECIIGTYRAAAKDRRFQFKLVPNYFVSVTDAKRKPWQVHVRIQNLKIEAGWQPLALEVVSVAMVTNNVVVKGLRERVIAVDDPNVEGFEGVVDEFIDSVAAFKAVDNFRKKKRKIGGRDVISKYKYRPEKYAGPDSLLNKEENVIQHHELESVPVFCSGMGRAHSDA

SEQ ID NO: 73 - protein, 265 aa, Youcai mosaic virus
MSYEPKVSDFLALTKKEEILPKALTRLKTVSISTKDVISVKESESLCDIDLLVNVPLDKYRYVGVLGVVFTGEWLVPDFVKGGVTVSVIDKRLENSKECIIGTYRAAAKDRRFQFKLVPNYFVSVADAKRKPWQVHVRIQNLKIEAGWQPLALEVVSVAMVTNNVVVKGLREKVIAVNDPNVEGFEGVVDDFVDSVAAFKAIDSFRKKKKRIGGRDVNSNKYRYRPERYAGPDSLQYKEENGLQHHELESVPVFRSDVGRAHSDA

SEQ ID NO: 74 - protein, 288 aa, Streptocarpus flower break virus
MAIVLSKPKVSEFLNLTKAEEILPKFLTRLKTVAISTRDVVSVKGTTDLVDIDLLRDVPVNNWRYVGIVGIVASGEWLLPDNVSGGVAISFVDKRLVDSREAILGTYRAAAVEKRFQFKLIPNYFVSQEDALRRPWQVQVSLKGLKFEEGFSPLTLEFVSVVVCANSVVTKGLRERLNNVGDPNVEVSEVVVDEFVDSISASQSLSRARNKYVRGNGKVGNNSGGFSKYNRHQPERFAGKAMYNSKNVVRGGTSEPTAILHKRMGGSNSIDESLFSVAESDLSDSGCA

SEQ ID NO: 75 - protein, 334 aa, Rattail cactus necrosis-associated virus
MSSLCVSDPAVLLSPELHLKVPQLKSLVQFWKKPFKTCSISMSDVIKVASSNPLSIAVDFSSAMPSGPRNFKYVYILAVVLTGRWHLSESCPGGATFVLYDKRLCGRAEGIYGSFFSKVSASKFQVRFSVGHSMTVNDLLRNPLHLCFSLESVPCQEGYEPLSVEVSSLQLFTDCILEESLSAKLVKYPALCTDNMSVISNVDDVIFKFNSVLNVDNVPNSVKNVVKCNKVFKGRRSRGKWVGSQNEVVVKDGTNVTPHRLIAKDALHQRTTERLRLPDQVMGRPPASDTVSERYADSGFPSTAVSHTTSERTVDDGGLRSDQIGPFPYRYVPY

SEQ ID NO: 76 - DNA, 4759 bp, Arabidopsis thaliana
  source 1..4759: mol_type = genomic DNA
ttcattcatcatcttcctcctctctctcttctctgtatcacccaactaaatcctcacgggattagatccaaagtctcaaactttgatccaaaaacacaaactttgttcaaaagacataaactttgagccaaagtcacaagctttcttggtgaacgatggattacaatccaaatcttcctcctttaggaggaggtggtgttagtatgagaagaagcataagtcgaagtgtaagcagagcaagtaggaacattgaagatatcttctcatctggttcaagaagaacacaatcagtcaacgacgatgaagaagctcttaaatgggctgccattgagaagctaccaacttacagtcgtctccgaaccactctcatgaacgctgtagtcgaagacgatgtttacggtaaccagctcatgagcaaggaggttgatgtaaccaagcttgatggtgaagatcgtcagaagtttattgacatggttttcaaagtagctgagcaagataatgaaaggatcttgactaagctaagaaacaggatcgatagagttggtatcaaacttccaactgttgaagtcaggtacgagcatttgacgattaaagctgattgttacactggtaatagatctcttcctacacttttgaatgttgtgaggaacatgggagagtctgctttaggtatgattggtattcaatttgctaagaaagctcagcttacgattcttaaagatatctctggggttattaaacctggaaggatgacacttttgttgggtcctccttcttctggtaagaccactcttttgttggctttagctgggaaacttgataaatctctacaagtcagtggtgatattacttacaatggttaccaactcgatgagtttgttccgagaaagacctctgcttacattagtcagaacgatcttcatgttggtatcatgactgttaaggagactcttgacttctctgctaggtgtcaaggtgttggtactcgttatgatctgttgaatgagcttgcgaggagagaaaaggacgctggtatattcccggaagccgatgttgatctcttcatgaaagcttctgctgctcaaggtgttaagaacagtctcgtcactgattatactctcaaaattttggggcttgacatttgcaaagacacaatagttggagatgacatgatgagaggtatatctggaggtcagaagaaacgtgtcacaactggtgagatgattgttggacctactaagacactcttcatggacgaaatatccactggtcttgacagttccactactttccaaatcgtcaagtgtctgcaacaaatcgttcacctcaatgaagccacggtgctcatgtctctcctccagcctgctcctgagacttttgatttattcgatgatatcatcttggtgtcggaaggtcagatcgtgtaccaaggaccgagagacaacattcttgagttctttgagagctttgggttcaagtgtcctgagagaaaaggaacagctgatttcctgcaagaggttacttccaagaaagatcaagaacagtactgggtgaacccgaacagaccttatcactacattccggtttcagagtttgccagtagatacaagagtttccatgttgggacgaagatgtctaacgaacttgcagtaccgttcgataagtctcgcggccacaaagcagctcttgtgttcgataagtactctgtctcaaagagggagcttctcaagagctgttgggacaaagagtggctgcttatgcagcgaaacgcgttcttctatgttttcaagactgtccagatcgtcatcattgctgcaatcacgtctacactcttcctgagaaccgaaatgaacacaagaaacgagggtgatgctaatctctacataggagcattgctatttggaatgatcatcaacatgtttaatgggtttgcggagatggctatgatggtttcaagactccctgtgttctacaaacagagggatctcttgttttatccatcctggaccttctcacttcccactttcttgcttgggattccaagctcaatattagaatcgacggcttggatggtggtgacttattactccattggttttgcacctgacgccagccgcttcttcaagcagtttcttctggtgtttctgattcaacaaatggctgcatccctctttaggttgattgcttctgtgtgcagaaccatgatgattgctaatactggtggtgctctcactctacttcttgtgttcttgctcggaggcttccttcttccgaaaggcaagattcctgactggtggggttgggcttactgggtatctcctctcacctatgctttcaacggtctagtagtcaatgaaatgtttgctcccagatggatgaacaaaatggcttcttctaacagcacaataaagcttggaactatggtgcttaatacttgggatgtctaccatcaaaagaactggtactggatttcagttggagccttgctttgtttcacagccctcttcaacattctattcaccttggcacttacctatctcaaccctcttgggaagaaggcaggtttacttccagaagaagaaaatgaagacgctgatcaggggaaagatccaatgcgtagatctttgtctactgcagatgggaacagaagaggagaggtcgcaatggggagaatgagtagggactctgcggctgaagcatcaggtggtgcaggcaataagaaaggaatggttcttcctttcactcctttagctatgtcctttgacgacgtcaaatactttgttgacatgcctggggaaatgagagaccaaggagttacagaaacaagactccaactgcttaaaggtgtgactggtgcatttaggccaggagttttgactgcgcttatgggagtgagtggtgccggtaagactacgcttatggacgttttggccggaaggaaaacaggtggatacattgaaggagatgtgagaatatcaggattcccaaaggttcaagaaacatttgctagaatctcaggatattgtgagcagaccgatattcactccccgcaagtaacagtcagagaatctctgattttctctgctttccttcgtcttcctaaagaagtcggcaaagatgaaaaaatgatgtttgtggatcaagtgatggaattggtagagctggacagtcttagggactccattgttggtttaccgggtgtcacggggctttccacggagcagagaaagagactgacaatcgcggtggagcttgtagccaacccttccatcatctttatggatgagccaacttcagggctagacgctagagcagcggctattgtgatgagggcggtaaggaacacagtggacactggaagaaccgtggtctgcaccattcatcagcctagcattgatatctttgaagcatttgatgaattgatgctgatgaagagaggaggacaagtgatttacgcgggtccattgggtcaaaactctcacaaggtggttgagtactttgaatctttccccggagtgtccaagattccagaaaagtataacccggccacttggatgctcgaagctagctcactcgccgctgagctaaagcttagtgttgactttgctgagttatacaatcaatcagcattgcaccagcgaaacaaagcgttggtaaaagaactaagtgtaccaccagcaggagcatcagatctttactttgctacacaattctcacaaaacacatggggacagttcaaatcatgcttatggaaacaatggtggacgtattggagatctccagactacaatcttgtccgtttcatcttcacattggcaacatctctcttgattggtacagtcttctggcaaatcggaggtaacaggtcgaacgcaggggatctaacaatggtgataggagcattgtatgccgcgattatcttcgtgggaatcaacaactgttcaacagtacaaccgatggttgcagtggaaagaacagtgttctacagagaaagagcagcaggaatgtactcagccatgccatatgccatctctcaagtcacttgtgagcttccctatgtccttattcaaaccgtttactactcactcatcgtctacgccatggttggtttcgaatggaaagccgaaaagttcttctggttcgtcttcgttagctacttctcattcctctactggacttactacggcatgatgactgtttccctcacaccaaaccaacaagtcgcttcgattttcgcctcagcgttttacggtattttcaacctcttctctggtttcttcattccaagacccaaaatcccaaaatggtggatttggtactactggatctgccctgttgcatggaccgtgtatggattgatagtgtcgcagtacggtgatgtggagacacgtatccaagtccttggtggtgctcctgacttaaccgtcaagcaatacattgaggaccattatggtttccaatctgactttatgggaccagtggcggctgtactcatcgctttcaccgtcttcttcgccttcatcttcgccttctgcatcagaactctcaacttccagaccagataaaaccatctctcaaacaacaaagtctctttctttttttgtatcctctgtgttgtttatatgcactataagctttgtatgttctaaatatgtattgtagtgtcataacgaaatttttttgaatatttttatttattgtcttatagatgatgacgaatcggaatcatgtaatataattccacttttttttgtgttta

SEQ ID NO: 77 - DNA, 1642 bp, Arabidopsis thaliana
  source 1..1642: mol_type = genomic DNA
gcttcacgagacaaacgacgaacaacgcaattacgcgttcttatctttctgggtatttcttaattatattactctatataaataaaaatacccagaaacgtaatttcgtcgagttcaaaaattcaattcaaagaataatttctttccataaaaagattgttgtggattaacttctttcttaaaagaatctcatacccgtcgaatcttcttcttcaacctttttctgcgtttttaatattttccctacaaaaagattctcaaaatcgttttacataaacccgatcttgtcaatctccagaaacaaaaaaaaaaaaatggcgatcaagacaaagactagtctaattccaagttgttcatcacctgaggatctaaaacgcgttttgcaaacgctaggttcgagctggggagatgtagttgaagatctggagcgtcttgaggttgttccgttaaaaggagctatgactaacgaggtttatcagattaattggcctactttaaacggtgaagatgttcatcggaaagttcttgttcggatctacggtgacggcgttgaccttttctttaacagaggtgatgaaatcaaaacgtttgagtgtatgtctcatcatggttatggtcctaagcttcttggtcgtttctctgatggtcgtcttgaagaattcatacacgccagaactctttctgcagatgatcttcgtgtagcagaaacatctgatttcatcgctgcgaagctaagagagtttcataagcttgatatgcctggtccaaagaacgttcttctctgggaaagacttaggacttggcttaaggaggctaagaacttggcttcacctatagagatggataagtatcggttggaaggtttggaaaatgaaatcaatttgttggaagagagacttactcgggatgatcaagagattggtttctgtcacaacgatcttcagtatggaaatgtcatgattgatgaagtaaccaatgccattaccatcatagactatgagtattcgagtttcaacccaattgcttatgacattgcaaaccacttttgtgagatggctgctaattaccattcagacactcctcatgttctggactacactctatatccaggagaaggagaaaggagaaggttcattagcacatatcttggctctacagggaatgcaacaagtgataaagaagtagagaggttattgaaagatgcagagagctacactttagcaaaccatatcttctggggactatggggaatcatctcgggacatgtgaacaagattgagttcgattacatggaatatgcaaggcagagatttgaacagtactggcttagaaagcctttgcttcttgaaggatgaagcagattcgcattgaaaagccgatatacaactaaaagtttctgcaattaggtcaaaagaaaaaaagaaaatttagtagactatatgttgctattgttactctcatcagtttgtgtgtttcttcccttctatatagaggtttgttaactctcaaaacagttaaattgagtaaaacttgttctaaacaaagtattatatgataatagaagaagcaccagtggtctagtggcatgatagtaccctgccacggtacagacccgggttcaattcccggctggtgcaattta

SEQ ID NO: 78 - DNA, 1043 bp, Arabidopsis thaliana
  source 1..1043: mol_type = genomic DNA
agtttcaaattagtaaacgataaagtagatgataattaaattcatgtcatagccatgaacgaatgttatgttaaaaaaatttcatgtaagtaaattctttggagttcgattcttcttttgtccttacacaatcaaagatttttctttcaactttttttacttaacagcattaactctttctcagatcttcaattgttttcctaaacgaaattatcattaaattgtttaaaaaatacacatttaatataacatatatcataacaagatatattatatttatgaaaaagagatgtagtactacagcatatggtggcaaacaaacccactaaattcagtaaaatggaacccaccaaatttatctataaataagtccccaaacctctcccccaaaaatgcaacaacactcatctttcccaatataagtttttaccaaacaacaacttttgttttgcctttcctcaaaacataattttgtcttattttctaaaccggtaaaagatgtcgctagctatcgcagaagtttacacggtgaggaagtttcacagagagagtatgaagaaaccggccaaacagacggttaccggcgagggagatgaaaagattggcggaggaagtttcaaggaggcgccggtgaagtcaggtgggtgtagaagattcggacggtggttttttgggaagccgggaatgaagaaaagctctgctaaagtttcggatcccatggcgattgagtgatgaagaagaaattaaaacttttctcttctttgccttttttttttttctttctttattttgttttattttcattggtctttttttaatggctttttctagtgtcttctctttttctttattgggtgattttataaatagtcggtaaacattgtacaatatgaactacaaaaatatgagaaaatctatatatgtatgtagaatggatgtattccctaaataccacagctagtttgataagttttatgccaaaccaactaaacttgtatgccacgatatttcgtatttcagaaaatcgaaaattgttatttttt

SEQ ID NO: 79 - DNA, 1428 bp, Arabidopsis thaliana
  source 1..1428: mol_type = genomic DNA
acaaaaaccatttgaattttctttcttcttcaaaagttcgaaacttttttttttccggcaatggagggactagttccggtacagagacttccaattaaagtggcttcaccttctctgtatcggtgtaacaattctgtctcaatcagacgttcaatttcaggttttgccatggacaggaagataaactttagggctccgtcgcaattctcgatccgagctcaacagtcggatttgaaggaaagcttagctgtgtcttcttcatcagtagaggataaaggaaatgttcttagaatcaaggaatgggaagtagagatgtatcaggaggaattagctattagtcaaggtattaggataaggagaaaaccaccaagtaaggctcctttgggatactctggaccatttgagttgagattgcataacaatgatgctgattctcctcgtaatatcttggaggagatcacatggtacaaagacgtagaagtttcccggatgaaggagctaaatccgcttgacgtgctgaagaaagctgtagaggatgctcctcctactagggattttgttggggctcttaggatggctcataaaagaactggcttccctggcttgatagctgaggttaagaaggcttctccaagtagaggaatcttaaaagagaattttgacccggtcgagattgctcaagcttatgaaaaaggcggagcagcatgcctcagcgttttgacagaccagaagtatttccagggaggctttgaaaacttggaagcaataaggagcgctggtgtgaagtgtccactattatgcaaagagtttgttgtagatccatggcagatctactatgctcggactaaaggcgcagatgcagtactgcttattgctgctgtattggctgacctagaaataaccttcttgcttaagatttgcaagaagcttagcttggctgcccttgttgaggtacatgatgagagagagatgggtcgtgtacttggaatagaaggaatcgagcttgttggcatcaataaccgaagtcttgaaacatttgaagtggacatcagtaatacaaagaagcttcttgaaggagagcatggtagacaaatccgtgagagagacatgattgtggttggcgaatctggtctgtttacaccagatgacattgcctatgtacaagcagccggagtcaaagcagttttggttggagaatccattgtgaagcagaacgaccctgagaaaggaatagctggactttttggcaggaacatttctcatacttagagaccatatcataatacatctccaaatacgtttcctagtacatttgttttgtatcttgctctgtgagtattgaggaaagactagaaaggtttgttggttctgatgtttaagacattttcaaaaaaccatcgaataaactgaatcgaaatcgatttacag

SEQ ID NO: 80 - DNA, 1388 bp, Arabidopsis thaliana
  source 1..1388: mol_type = genomic DNA
agataagagcgaaacaaattacaaaattgaattacacaataatgtcctctaagcgacgactaccggtgaaatattttataagaaaacaaaaacaataattaacaaacaaaggcgacacctttagattcgacaagacgaccattttagaaaaagcttctcaaattctctccttatccccaaaaattcaaacttttttctctttggaaaattctgaggcaaaaatgcggcgtaattgctgccatgtttcatttgcttcaaccctcaagatccttaattttgtccaagctttcattggtgtttcgatcattatctactccatatggatgctccatgaatacagccgtcaccttcccgtggacccgcctccgtcagcttcatcaagctccggaaccgagatcgctactagtgtatctgagcccttgaagaatcctattgattttgtggcgagtatcattctcgggtctaatggtggtgatcatgggtttaacctacgctcgttggaccttcctgctccatggttcatctactctttcatggcggttggtatattggtctgcattgttaccttcattggtttcatagcagctgaagcaatcaatggctgttgcttgtgtttttactctattctcaaaactctgctcattctacttgaagctgcacttgttgcatacatcgctattgaccgtcactgggaaaaggatcttccgtatgatccaactggagaacttagtagtcttagggctttcattgaagaaaacatcgatatatgcaaatgggtggggattgctgtggtagcagtccagctactgtcattgctactagccatggttctcagagcgatggtttcaaccccgaaacccgaacttgacgaagaggaagatgatgagaacccaaggagtagaacttgggacccacttcttggtccgcaaggaaaccaagcgcctgctggctcaagcaagattgaaaactggagctcccgaatcagagaaaagtatggtttgaaccagagtccaccggtgaacccgaaaggttgatgaagccaaataatcatgtttctaaaactgcatgtgtccatatggtctctgtgaagctctctttctctatgttttgctctttgcaacttctcgagtgtgcataaacatttactcaaaacagtgctgtattgtgtttacacaaacggcataagcatcttcgtttgtgtgtttgcttgtacaaacaatcctgtgaacagtttgaagttagcatttccactataacgtttcgattcaatttataatgaagaaaacaaaactaaaaattgaattggacatcataaacagattaatgtaaaatgtatatgtaggttaaactctttcttagattatatcatctatatatgtttcattatt

SEQ ID NO: 81 - DNA, 1145 bp, Arabidopsis thaliana
  source 1..1145: mol_type = genomic DNA
gactccattattatccctctctctacaaaaaaaacagtagagagagatatagagagcatcaatggcgtcgtcgtcaagactttgcgattcgtgcaaatcgacggcagcaactctattctgccgcgcagacgccgcgtttctctgcggcgactgcgacggtaagatccacacagctaacaaactcgcatcacgtcacgaacgagtttggctatgtgaagtatgcgaacaagcaccagcacacgtcacgtgcaaagctgacgccgctgcgttatgcgtcacgtgcgaccgtgatatccactcagctaatccactctctcgccgccacgagcgcgtaccaatcactcctttctacgacgctgtaggtccagcaaaatccgcttcctcctccgtcaatttcgtagatgaagatggcggtgacgtcactgcttcgtggcttttagctaaagaaggaatcgaaatcactaatttgttctccgatcttgattatccgaagattgaggtaacgtcggaggagaatagctccggtaacgacggagttgttcctgtgcagaataagttgtttcttaacgaagattacttcaatttcgatctctctgcttccaaaatttctcaacaaggattcaatttcatcaaccaaactgtttcgacgagaacgatagatgtaccgttggtgcctgaaagtggaggagtgacggcggagatgacgaacacggagacgccagctgtgcagttatcaccggcggagagggaagcaagggttttgaggtatagagagaagaggaagaatcggaaatttgagaagacgattaggtatgcgtcgcgtaaagcttacgctgagatgaggccgagaatcaaaggacgttttgctaagagaacagattcgagagagaatgatggtggagacgtcggagtttatggcggattcggtgttgttccgagtttctgatattttccggtgaaagaaacatggtagtagtatatcggttaatagcagattaaggataattaaaactaaaatgtttcctgatttaatcaggggctaagttattgttagaagattgttgttttttgaattaattctcacaattgtatcctaaattatatagtttacttaatgttgaactaataaattttgatttacaatc

SEQ ID NO: 82 - DNA, 2268 bp, Arabidopsis thaliana
  source 1..2268: mol_type = genomic DNA
atggcggaatcaagctctcctctccctcctctttgtgaaaggatctcacacaaaagctatttcttaagagctgtggatctcactattctaggtcttctcctttctcttctattgtaccgtatcctacatgtgaaccaaaaggacaccgtttggatcgtggctttcctctgtgaaacttgtttcaccttcgtatggttgcttattaccaacataaaatggagtcctgctgattataaaacatatcctgaaagacttgatgaaagggttcatgaacttccaccggtagatatgttcgtgaccacagctgatccagtaagggagccaccgcttatcgttgtaaacacagtgctttcactgttagctgtgaattatccggcgaacaaactagcttgttatgtgtcggacgatggatgttcacctctcacttacttctctctcaaggaagcttctaagtttgccaagatttgggttcctttctgcaagaaatacaacgttagagttagagctccttttatgtacttcagaaactctccggaagcagcagaaggttctgaattcagtaaagactgggaaatgactaagagggagtacgagaagttaagccagaaagtagaagatgccactggaagttcccactggttggatgcagaagatgactttgaagctttcttaaacacaaaatcaaatgatcattcaactatagttaaggtggtatgggaaaacaagggaggtgtgggagacgaaaaagaggtccctcatgttgtttacatttcaagagagaaaagaccaaatcactttcatcattacaaagctggagccatgaactttctggtaagagtgtcagggttgatgacaaatgcaccatacatgttgaacgtagactgcgacatgtatgtcaatgaagcagatgtggtgcgacaagcaatgtgtatatttctgcaaaaatcaatggattcaaaccattgtgcttttgttcaataccctcaagatttctatgattctaatgtcggtgaactcaccgtcttacaattatacttgggacgaggaattgcgggaatccaaggacctcagtatgcgggttcaggatgcttccatactagaagagttatgtacggtctttctctagacgatttaggagacgatggaagtctttcttcaattgctacaaggaagtatttagctgaggagagtctaacgagagaatttgggaattctaaggagatggtgaaatcggtggtcgatgcgttacaaagaaaaccatttccccaaaaaaaccttaaggactctctagaaacggctcaagaaatgggacattgtcactacgagtaccaaaccagctggggaaaaaacatcggttggttatacgattcaacaacggaagatgtgaacacgagtatcggaattcattcgagagggtggactagctcatatatttttccggatccaccggcgtttcttgggtgtatgccacaaggaggaccggaggtaatggttcagcagcgacgatgggccacgggactgctcgaaatccttttcaacaaacaaagtccgttgatcggaatgttttgtcggaaaataagatttcgacaaagcttggcttatttatacgttttcagttggggtctaagatcaatccctgagctcttttactgtctcctgcctgcttattgcctactccacaactctgctttatttcccaagggagtttacttaggtataatcatcacacttgtggggatacattgtctttacactttatgggaattcatgaaccttggtttttccatacaatcgtggtatgtcactcaatcatttgggaggataaaaacaacttgtagttggttatttagcgtccttgatgtcatactcaagcttcttggaatatcgaaaaccgtcttcatagtcactaaaaagactatgcctgagaccaagtcagggtctggatccaaaaaatctcaacgagaagttgattgtccaaaccaagattccggtaaatttgaatttgatggctcgctttatttcttgccgggcacattcattgtgttagtgaatctagccgctctagccggttgtttggtgggtctacaaagtcgcggaggaggtggttcgggtttggcagaagcctgtggctgtattttggtggttattttgttccttccatttctaaagggtatgtttgagaagggaaaatatggtatcccattttctactctttctaaagctgcctttttagcagcgttatttgttgttttatctgtgggaaactag

SEQ ID NO: 83 - DNA, 1381 bp, Arabidopsis thaliana
  source 1..1381: mol_type = genomic DNA
catatttatactactagtatataagttaagggtttaagcctcttctcttccttctttctcttagccatcacatcgataatggcttctcttctaacaaaacccaaacccgttttcctctgttcaccatcgttatctccaagaactttgaacacagcaacaccgtcattgaatttcaccagaatttcattcacccatcaccaaaagcttgctcctttcaagcctcctagtctcgttgttgcattctctgaaaagggtttgaagagagatgtcaccacagctgctgcagcgacggagggagattacagaaggataatgttatctgatgtgttggtgaagaagaaggaaaaagtagtttggtgggagagagaatggaaagctatggactttggagctgttgctgtcgttttgtctatgcatttgcttagtcttttggctccgtttcaattcaattggagagctgtttcggttgcttttgggctttatatcgttacaggtcttctggggattactctgtctttccataggaatctttctcataaagccttcaagctacctaaatggcttgagtacttgtttgcttattgtggagctcaagctcttcagggaaacccaattgattgggtgagtacacataggtaccatcatcagttttgtgattcagacagagaccctcatagcccacttgatgggttttggttcagtcacatgaattggatgtttgataccaatacaatcacccaaaggtgtggagagcctaataatgttggggacttggagaagcagccattctatcgattccttcgaaccacctacattttgcatccgctggctctagcggttgctttatacgcaatgggtggctttccattcatcgtttggggaatgggtgtaagaatagtatgggtatatcatataacttggctagtgaactcagcttgtcatgtatggggaaaacaagcatggaacacaggcgatttgtctaagaacaactggtgggtagcagctctagcattcggggaaggatggcacaacaatcaccatgcttttgagttctcagctcgacacggcttagaatggtggcaacttgatatgacttggtacgtcgttaagttccttcaagccatcggtttagcaactgatgtcaagctcccatcggaagctcagaaacaaagaatggcattcaccagcgactgatcttaaaaaactacatggttatgcctaaagtcaaaactgtcggttcgattgaagctatgaaggttttaaaaaaggattttgttctgcttttttgtgtttacttaaaggtatatatctgtgcaagagattgtatgtgacaaactgattatgaataatatctataattacattcaatacaaaaggaagc

SEQ ID NO: 84 - DNA, 980 bp, Arabidopsis thaliana
  source 1..980: mol_type = genomic DNA
aaatcactcaccacataaagtaaaagtctcatctcttcataaaatagctttaaaccaatcaagtagagtttcttctcaagtctttttattttatttttatcaatggcttcttcagcagtgtctctccaatccatctctatgacaactctcaacaatctttcatgtaatcaacaatttcatcgaagctctcttcttggttcctctaaatccttccaaaatcttggtatctcatctaacggttcagatttctcctatccatcaagtttcactgccaagaagaacctcactgcttctcgagctctctcccaaaacgggaatatcgaaaaccctagaccaagcaaagttcaagaactgagtgtgtacgaaatcaacgaattagatcgacacagccccaagattcttaaaaacgcattcagcttaatgttcggtctcggagatctcgtaccattcacaaacaaactctacacaggcgatctcaagaaacgcgtgggcatcacggcaggtctctgcgtcgtcatcgaacacgtcccagagaagaaaggtgaaagattcgaagctacttatagcttctacttcggagactatggccacttgtccgttcaaggaccatacttgacttacgaggattcgttcctcgccatcactggtggtgctggaatctttgaaggtgcctacggacaggtcaagcttcaacagcttgtgtatccgacaaaactgttctacactttttaccttaaagggttggctaatgatttgccgttggagctcaccggaacaccggtaccgccgtctaaggacatagagccggcgccggaagctaaggcactggagcctagcggagttataagtaactataccaactaattcatgaaattaaaatgtttctcgtatcgctgtgtaatgatataaagatttgtagttttgtgctcttatctgtaataaaatcattgaggaataatatctcgagtatgttttaagtc

SEQ ID NO: 85 - DNA, 2706 bp, Arabidopsis thaliana
  source 1..2706: mol_type = genomic DNA
ccggttacagctacaccgccgttttctctctccgccgtcttttctcttcttctccgactgaatctgtgaaggtgaatttcggagttgagaaagagagattagcgtgtaatggcgatcgataatggcaagcttcaagaagaagaagcctcatctgttactcgattctataacattattttgggttgggactataaacagcttactaaagagaatgagaggaaaaatagaaaggattctaaagagaaattgaatgttgtaaagaatacttataaagatgttgatgattatttcgagacttttgaaccattgctcttcgaggaagttaaagctcaaattttgcagaataaagatggtgaagaagcatcggtgtgtaaaatgagattggtaatggagtgcaacgagggcgaagggtttcactttctgttagtcacatacgaacatgaggaggatgaatatcttgctcaaaatgatcttttattgctatcaaaagaagaggttaaagggaattcatttccttcatcttatgggtttgctgtagtggaacatcgtcaaaataatcttcttcgtcttcggatgtatttagctgaagacattgtgcagataaccaagaatactaaatcctctagaacaaagtcatttatccaagcgctttcaaatatgcgttctcttattacatcatctgccagccctattgacaaaagggtattcagtttaaagttatgtggtttatcaaccattattcgggaatatatagcactacgatcagttagttcgctccctttcaaggatttaatcttcactgcagcagaaaaatcttgtggttttggagatgaagcatggaaaatatctggacctctgaatgaattctttaacgaaaaccttaacaaatcccaaaaggaggcaattgatgttggtctatcaagaaaatccttcgtcttaatacagggtcctccaggtaccgggaaaactcagacgattcttagcatacttggtgctattatgcatgctactcccgcaagagtccagtctaagggtacagatcatgaagtaaagcgtggtattcagatgactatccaggaaaaatacaatcactggggaagagcctctccttggattttgggtgtcaaccctcgagatgctattatgcctgaagatggtgacgatgggttctttccaacctcaggaaatgaattgaaaccggaggtggttaatgcgagtcggaagtacagattacgtgtacttgtctgtgctccatcaaactctgcacttgatgagattgtgttgcggcttctgagttcgggtcttcgtgacgaaaacgcccagacatatacacccaaaatagtacgaattggtctcaaggctcatcactctgttgcgtcagtatcactggatcaccttgtggcacaaaagcgtggctctgccatcgataagccaaaacaagggactacaggaactgatatagatagtatccgcactgcaattttggaagaggctgcgattgtgttcgctacccttagcttcagtggctctgcacttcttgctaaatctaaccgtggtttcgatgtcgttataatagatgaagctgcgcaagctgttgagccagcaactcttatccctttggccactaggtgcaaacaagtatttctggtaggggatccaaagcaactcccagctactgtaatctcaactgttgctcaggattctgggtacggtacaagcatgttcgagagacttcaaaaggctggctatccagtaaaaatgttgaagacccaataccggatgcatccagagataagaagctttccgtcaaagcaattctatgaaggggcactagaagatggatctgacattgaagctcagactactcgtgactggcataaataccggtgctttggtccattttgcttttttgatatacatgaagggaaagagtctcaacatccaggagcaactggttctcgggtaaatctagacgaggtggaatttgttcttctcatctaccacagacttgtaaccatgtacccggagctgaagtctagttctcagctagctattatatcaccgtataactaccaagtaaaaactttcaaagatcggtttaaggagatgtttggtacagaggcagaaaaagtggttgatatcaacactgttgatgggttccagggaagggagaaggatgttgcaatattttcatgcgtcagagctaacgaaaatggacaaatcggttttctctctaattctcggcggatgaatgtggggattacacgagccaagtcttcagtattggtcgttggttcagctgcaacattgaagagcgatccactttggaaaaaccttatcgaaagtgctgagcaaagaaaccgattattcaaggtttcaaagccattgaacaatttcttcagcgaagagaatctggagacgatgaaactgacagaggacatggagattcctgatgcaccgttgtatgaagacgaatctcttccggtggcaccatatggtggagatgatgactttggagatggtgatgctgatcaagacgatgtagccatggccggagaagactaaactctaaaaaccttttcgttattagttagaactttgatattacaggaagtggttgaacatctaacaatatctacacttattatttgtatggttttattttggtttacatacagtaataagaatgtctttacttgtgctacg

SEQ ID NO: 86 - DNA, 1543 bp, Arabidopsis thaliana
  source 1..1543: mol_type = genomic DNA
ctctttctttgtgggttctagtttgtgtgtatatatactatatgcacatacacataggaagatatgatgggttacgagcagatgaatcagatgacaatgacgacaacagcgatgatgaagaattacaataagaagggactaatcaatactccacagaagaaaatgacgaggagaagtgtgtcggctattgatggtggtgcagctgcgacggctaaagaaggagatcgccgtcagaatatcaagactcttgatcttagcggcatgtccttggcttctctctctgcctcttctatcaacttagcttcaatctccaaactcgatctctccaacaacaatattcagaaaattccggaatctctagtagcgagaatgttaaatttgtgggcattggatttgcaatccaatcagctaaaaactcttccaaactccattggatgtctttccaaacttaagtttcttaatgtctccggaaattatctccaatctctccccaaaactatagaagattgcagatcgctggaagagctgaacgccaacttcaacgagcttacaaggctcccagacgcgatagggtttgagctaacgaatctgacgaagctctccgtcaactcaaacaagcttgttctcttgccaaactccgttagctacttgacgtcgctgcgtgtgctcgacgcgcggctaaaccgccttagttccctccctgaggatcttgagaacctcgtgaaccttcaggtcctcaacgttagccagaacttccagcacttgacgacgttaccttactccgttgggttgttgatatctctcgtggagcttgatgttagttataacggaattacggttttaccagactccctcggctgtcttcgccggattcagaagctatccgtggagggtaatcccctcatttccccaccatttgaagtggtggaacaggggttggaagcattgaagcagtatatgagcgagaagatgaccgagtcttataagaaaactccgaccaagaaaaagtcttggggcattggtaagctcgtaaagtacggcctgagctcttctccggggaggagtaccggccgtgaagacgggaaggaaggcttcatcaatgtatctgattaccgccaaatcgacggaatcgcctcaccgcgacatgtgtccctcttcaacccgcgacgcctcttgtctccactctccgcgtatttctctcctcctaggtattagcttatttaggtgtgttgtctgtctttttttttttcatcttctacatacgattccataccgttttcactgttacatccatgtagtgttaaattgttaatgttcttttacgttgttttctgcatgcttggtgtgaggataaaatttaattaaattgtgtatacgtttttttttccctgtctcatagaatttttctatggcttttctcatttcgttgtattgtagttcaattttgttgaacacatttgtaaactattacatagacacttaatattttactatgtatataatgtaaaatcgcatttttgaaagtactccaccatccttctca

SEQ ID NO: 87 - DNA, 1543 bp, Arabidopsis thaliana; identical to SEQ ID NO: 86
  source 1..1543: mol_type = genomic DNA

SEQ ID NO: 88 - DNA, 3675 bp, Arabidopsis thaliana
  source 1..3675: mol_type = genomic DNA
ctttcactcttcccttctctctccccaaaataaatcagaaacctatcaacattcttcaacagccacaagtaaaatttatagacatttctgtctgaagaagaaaaagattgaatttttttgcttgttgtgggttctttaatggatccaagaacaagacttgactatgctctgtttcagctcacaccaactagaacaagatgtgatcttgtgatattctctggtggtgagaatgagaaacttgcttctgggatttttcaacctttcgttacgcatctcaagagcgttagtgatcagatttctaaaggtggatactccgttactctccgtccttcctccgttggtgttccttggtttactaaagtgacccttcagagatttgtgcgatttgtgactactccggaggttcttgagaggtctgtaacattagagaaggagattgagcagatcgaggattcgattcaagctaatgcagccgccattgccggtgaagctgaaggaaacgagttgggtggtacatggacttctcaaaagtctacggctttatcaaagacgaaaggggaaactgatggagacactgtggaagaaaattcgaaggttggtcttcagcgtgttctggagaaccgtaaagcggctttgtgcaaagagcaagcgatggcttatgctcgagctttggttgttgggtttgaacttgactacatggatgacctcttttcgtttgctgatgctttcggagcttcgcggttaagggaagcgtgtgttaactttgtggacttgtgcaagagaaagaacgaggatagaatgtgggtggaccaaatcactgctatgcaagcatttcctaggcctgaattaacgttcatgggtgactctgggatcgtactcgctggtgaagagaatgatttgttgaatgctacaaacgtaaagcatggaaactctatggatgcctcgagccagggtagctttgagactggccaagaagggagagctcaaatggcaatgccgtggccaaaccagtttcctcagtacatgcagaactttcaaggacatgggtatccgcctccttatatgtttccggggatgcaaggtcaatcaccatatttccatgggaatatgcaatggcctgtaaacatgggagatgtggagtcaaatgagaagtcttccaagaagaaaaagaagaagaagaagaataagaagaagtcgaagcaagatgaatctgccgagccaagcgataattccagtactgagaccgaatcagaagacggaaatgaaggaaagaaacaatccaggaaagtggttatccgcaacataaattatataacttcaaagaggaatggagcgaaggagagtgattcagatgagtctggagaagaagaagggtttgtggatggagattctattaagcagcaagtagaagaagccattggctcagtggagagacgtcataaatcgacttcacaccgtcagaggaaacacaaaagtcacaacggtgatgatgattcaagtaacaaggaaactaaggggaatgataattgggatgccttccagaatcttcttttgaaagacaatgattcagagccagaagaattactacgtatatcatcaactgcgttaaatatggcgtctgaagttgtgagaaagagagaaccgccttctgatgattcattcttggttgcaattggaaatgaggattggggaagagaaaccagcattgagaaattcaatgcaggtgagaatgttcggataataaggaaagggaacaactatgacgaggagatgttgaatccgggtagaagcgatgaatcaagaagctattcgcaggcagagatgtcggttcatgatgggaagctcagaaccagaaatgaggcggaagaagactggttcatacgtaaccaagctggtccagaaacagatccaagtcttgtcaaaacatttgtaggagaccatttccacttaaataagagcagtgagagagatgtcctgaccgatgactctttcatgatccattctcgtgttgagaaccaagtagaagattctcggttaaggacagaaatcatggacttagacgtttacggaaccacccaacaagaaaacagtgccccggagaacactccgcatgaaccagatgacctatacatggttcttggacgggaacaagatgttaaacctacattgttaccatggacccctgaaattgactttgagactaacactttggctcaaagaacaagcagaatcgatttgataactgccacaaaggcctctgcaggtgaacaaaccttagatggtaaagaaaagaagagtcgtggtatctccaaggggaaggatgcaaagtcaagagcatcaagtagacctgacccggcgtcaaaagccaagagacctgcttggggaagtagagctgctgtctccaagtccaaatccgagatggaggaagagagaaagaagagaatggaggaacttttaattcagaggcaaaagagaattgcggagaagagttccggtggtagtgtatcaagttctttagcgtccaagaaaactcctactgtgaccaagtcagtgaagagctcgataaagaatgagaagactcctgaagccgcgcagtcaaaggctaagccagtactgagaagttccaccattgagcgccttgctgttgctcggaccgctccaaaggagccacagcaaaaaccagtaatcaaaagaacatcaaaaccttcaggatacaagacagagaaagctcaggaaaagaaatcgagtaaaataggtcaatcagatgcgaaaagtgtggaactttctcgtgacccgagtctcgaaatcaaggaaacggtggtggaagattcacattcttacttgtcagagaagcaagttgatgcacttcctgctgttgcttctgttgatgatttcaaagacattaaagaattgcatagcttgccatcagaagaaacggccagagtaaagaacagaccgaatgaaatcatagcagagaaagtacaagatcagacgaagatcgatgatcaggaaacagtgaagaatacatctgtttctgaagataagcaaatcaccacgaagcattactcagaggatgttggagaagtccaggcttcacaggaaaaaccggtgtctccaaagaagtcggtgactttttcagagacaaacatggaggagaagtattatttctcaccagcggtctcagagattgacatctcaacgccacctgctactgaagcagatcattcgaggaagaaatggaacagtgaagagacgtctcccaaggcaacggctaaagtcttcaggaagcttcttatgttcggaaggaaaaagtaaaaccgacgttggaattcttcttctccggcatcatcgaacctttgttttgagacgacgtcatgttgagttcagagaacaatatatggggatgtgttggaatcatgaatcgtaggttaaatcctacaagaggaaaagcttcaggagacagagaagatgaagagaagagaagaaaggaagaagaagaagaagtcgtgacaaagaaagtcagctaatagacatatctccgctatttaaagtcgagtctaagcctttatacacttaaaggttgagggttcgaacccttgttatgtctttttgccctaaaagaaaaaaactttctcatgaaattccgtgagatgattcttccattctaagcatttg

SEQ ID NO: 89 - DNA, 3675 bp, Arabidopsis thaliana; identical to SEQ ID NO: 88
  source 1..3675: mol_type = genomic DNA

SEQ ID NO: 90 - DNA, 3727 bp, Arabidopsis thaliana
  source 1..3727: mol_type = genomic DNA
atatccagataattaattctctcataatatcttctccacaatttcaactcttctaaagtctaaaccatgaagttactctcaaagacctttttgatattaactctcaccttcttcttctttggcattgcactagcgaaacagagctttgaaccagagatcgaagctttgaaatccttcaagaatggtatttccaacgaccctttaggagtattatcagattggaccatcatcggttcgttacgacactgtaattggaccggaatcacctgcgatagtaccggacatgtagtctcggtttccttgctggagaagcaacttgaaggtgttctgtctccagccatagcgaatctcacctatctccaggttcttgatctcacttcaaatagttttaccggcaaaataccggctgaaataggaaagttaaccgagcttaaccagcttattctgtacctaaactatttctctggttcgattccttctggaatctgggagcttaagaatattttctatcttgatcttagaaataatttgttgtccggtgatgttcctgaggaaatctgcaaaaccagttctttggtattgattgggtttgattacaacaacttaaccgggaaaataccagaatgcttaggagatttggttcatctccaaatgtttgtagcagctggtaaccatttaactggttcgattccggtatcaattggtactctggctaatttaacggatttagacctgagtggtaaccagttaaccggaaaaataccgagagattttggaaatctcttgaacttacagtctctcgttttaactgaaaacttgttggaaggagatataccagctgagatcggaaactgctcgagcttggtccaacttgagctttacgataaccagttaaccgggaaaataccagctgaattagggaatttggttcagctgcaagcactccggatatacaagaacaaacttacttcttcaattccatcttcattgttccggttaactcagttaacccatttggggttatcagaaaaccatttggttggaccgatatcagaagaaatcggttttcttgagtcacttgaagtcctcacacttcattccaacaacttcacaggagagtttccacagtccatcacaaacttgaggaacttgacagtcctaacggtggggttcaataatatttccggtgagctcccggcggatctagggcttcttacaaaccttcggaacctttcagcgcacgacaatcttcttaccggaccaataccttccagcataagtaactgcaccggtcttaaactcctggacctgtctcacaaccaaatgactggcgagatcccgcggggtttcggaaggatgaatcttacgttcatttctattgggaggaatcatttcaccggtgaaattccagatgatatcttcaactgttcaaacttggaaactcttagtgtggcagataacaacttaacaggaactctcaagccattaattgggaagcttcaaaaactcaggattttgcaagtttcatataactctctcactggaccgattcctcgagaaatcgggaatctgaaagatttgaatatcttgtaccttcactctaatggtttcacagggagaatcccgagagagatgtcgaatctcactctcctccaggggctaaggatgtattcaaatgatcttgaaggtccaattcctgaagaaatgtttgatatgaagctactctcagttcttgatctttccaacaacaaattctcaggtcaaattcctgccttgttctccaagcttgaatcgcttacctacttgagtcttcaaggaaacaaattcaacgggtctatccctgcaagccttaagtcgctttcgcttctcaacacattcgatatctccgacaatcttctcactggaaccatccctggagagctgttagcttctttgaaaaacatgcagctttacctcaacttctcaaacaacttgttgactggaaccatcccaaaggagcttggaaagcttgaaatggttcaagaaatcgacctttcaaacaatctcttttctgggtctattccaagatctttacaggcctgcaaaaatgtgttcacactggatttttcgcagaacaatctctcgggtcatataccagatgaagtcttccaaggcatggatatgatcataagcttgaacctttcaaggaacagtttctctggagaaatccctcagagcttcgggaacatgacgcatttggtctccttggatctctctagtaacaatctcactggtgaaattccagagagtctcgccaatctttcgactctgaaacatctcaaactagcttcaaacaacctcaaaggccatgttcctgaatccggggtgttcaaaaacatcaacgcctctgatctaatgggaaacacagatctctgtggtagcaagaagcctctcaagccatgtacgatcaagcagaagtcgagccacttctcgaagagaaccagagtcatcctgattattcttggatcagccgcggctcttcttcttgtcctgcttcttgttctgattctaacctgttgcaagaaaaaagaaaaaaagattgaaaattcatcagagtcctcattaccggatttggattcagctctgaaactgaagagatttgaaccaaaagagttggagcaagcaacagattcattcaacagtgccaacatcattggctcaagcagcttaagcacagtgtacaaaggtcagctagaagatgggacagtgattgcagtaaaagtattgaatctaaaggaattctctgcagaatcagacaagtggttctacacagaagctaaaacattgagccaactaaaacatcgaaacctggtgaagatcttagggtttgcgtgggaaagcggcaaaacgaaagctttagtgcttccatttatggagaatggaaacttggaggacaccattcacggctctgcagcaccgattgggtcgcttttagaaaaaatcgatctttgtgttcatatcgcaagcggaatcgattatcttcattctggatatggttttcccatcgttcattgtgatctgaagccagctaatatactccttgacagtgaccgcgttgctcacgtaagcgattttggaactgctcggattctaggtttccgcgaagatggaagcaccacagcttcaacatcagccttcgagggtacaattggatacttagctccagagtttgcttatatgaggaaagtgacaacaaaagccgatgtattcagcttcgggatcataatgatggagctgatgacgaaacagagaccaacttcgttgaatgatgaagattcacaagacatgactttgcgccaattggtggagaaatcgattggaaatggaagaaaagggatggttagggttcttgatatggaactcggggactctattgtttctctgaaacaggaagaggctattgaagactttctgaagctttgtttgttctgtacaagctctagacctgaagatcgacctgatatgaacgagattcttacacatctgatgaaacttagaggcaaagcgaattcatttcgagaagatcgtaacgaggatcgagaagtttagcagcaaagcttttttgatgacattttttcgactttgccaaactctgttacgaaggttgaatactttggacgtaaaacgttctgattttgcttttcgttatgtatttctgttttatataaggttgaaatttggttttgat

SEQ ID NO: 91 - DNA, 1177 bp, Arabidopsis thaliana
  source 1..1177: mol_type = genomic DNA
caaaacaaaacgccattttttgtcgattcttcgtcgtcctcctttgaaattcacaccaatttgtctctcttcctagagaaacaaaagattattcgaaactcgggaaagtatcatccggtcaccggaaaattgattatttccgatgccaataggtgaccgtcagaatccgagtgtggagaagaagaagaacctcttcaggctatgtccgttttggcagaggagaagcaccacttcttcatcttcaacacagaatccaaaccaaaactaccgtagccgccatggaaatcggaatacagatatttccgccgtctctaagcctccgttgactatgtcttccgtcgccagatcacttcttccagctcgccgtcgtctccgactagatccttctagttatctgtatttcccttatgaacctggaaaacaagttcgcagcgcaataaagcttaagaacactagcaaatctcatactgcatttaagttccaaacaacggcacctaagagttgttatatgcgtcctcccggaggtgttttggctccaggagagagtgtttttgctactgtgttcaagtttgtggaacatccagagaacaatgaaaagcagccgttgaatcagaagagcaaggttaagtttaagattatgagcctgaaagttaaaccaggagtagagtatgtgcctgagttgtttgatgagcaaaaggatcaagtagcagtggagcaggttcttcgggtcatttttattgatgcggaccgcccaagtgctgcattggagaaactgaaacgtcaattggatgaagctgaagctgcagttgaagcaagaaagaagcctcccccagagacagggcctcgagttgtcggggagggtcttgtcatagacgaatggaaggagagaagagagaagtaccttgctcggcaacaagtcgaatccgtagattctttgtcctaaacgcagagagcaatgtggacttgttctgcagatcatgtacataatttattatccctcgattatgtatttatctctagacgattactttgtggttcttgtatgtctctgtttgttgtgtgattcatgccggttttttctccttcatcaaattttgtttcggtcgtttttagttgatctagaatcgaaccagagtttgttcagtatttagttacaaatgaaaaatcctgttatacc

SEQ ID NO: 92 - DNA, 1115 bp, Arabidopsis thaliana
  source 1..1115: mol_type = genomic DNA
tactcacttttacaactaactcataagtaaaacacagacagtttttagatggctaagatatattccccttcttttcccggtactctctgtctttgcatttttactctcttgacgctaatgttcattcgggtttccgctcgacccgcgacattcgtcgaggatttcaaagccgcctggtcggaatctcacatccgtcaaatggaagacggaaaagctatccagctcgtccttgatcagagcactggatgtggatttgcttccaaaagaaaatatctattcggacgagtgagcatgaagatcaaactcattcccggagactctgccggtacggtcaccgctttctacatgaactccgatacggccacggtgagagacgagctagattttgagttcttgggaaacagaagtggtcaaccttactcagtgcaaacaaacatatttgctcatggcaaaggagatagagaacaaagagttaatctttggttcgacccatctatggattaccacacttacactatcttatggtcacacaaacacattgttttttacgtagacgatgtgccaataagagaatacaaaaacaacgaagccaagaacatagcttacccaacatcacaacctatgggagtatactcaacattatgggaagcagatgactgggcaacacgtggtggattagagaaaattgattggagcaaagctccattttatgcttattacaaagatttcgacatcgaaggttgtcctgttcctggaccaaccttttgtccatcgaaccctcataattggtgggaaggttatgcctatcagtctcttaacgccgttgaagctcgacgttaccggtgggttagagtaaaccatatggtttatgattattgtactgaccggtctaggtttcctgtcccaccacccgagtgtcgtgcttgaaaataattgcatacgtacgttgcaatgatcatgtttcgtcttgtacgagattttatatataaattgtgggaaaatgtggattgtattgtcctcttacgcaattgtgcagacgtacgtgagtgtgtatagatataattgtgatttgtggttatttgaaatttttataaacatagatgaattctgtgaag

SEQ ID NO: 93 - DNA, 1981 bp, Arabidopsis thaliana
  source 1..1981: mol_type = genomic DNA
actggtgtgcgcactaagcaagcatactctattatttgtcgaaatcacaagagccagccagtctctctgagttctatcacaatcttcttcttcagagcttattgagtaatggcggcttcaatgcagttctacggagttaaaacaccagaacttgccttaaactcaaaaaggattgagtttagctcaaaggggctcaacttctcagcactcgtgtcctctgctcgtgtattctctagaaacgtagatcgttcttgtaagaacatcgctctgagagttacttgtgaagcgggaagagtggagctgctagagagaaaagcctcagagactttcaagttaaacaaaactgagaaaaaattgacctgtgtaatgaaattcggtggctcatcagtggcatcagcagaaaggatgatacaagttgccaaactcatactcagcttcccagatgagaagcctgttgttgtgctatcagcaatggcaaagaccaccaataagcttttgatggctggggagaaggctgtttgctgcggtgtcaccaacgtcgacactatcgaagagttgagctatataaaggaactccatataaggactgctcatgagcttggagtggaaacagcagttattgcagaacatctagaaggactggaacagcttcttaaaggcgtcgcaatgatgaaggaattaactttacgctcaagagactacttggtttcatttggagaatgcatgtccactaggctatttgctgcgtacctgaacaaaattgggcacaaagcacgacagtatgatgcatttgagatcgggattatcaccacagatgacttcactaatgctgatattcttgaggcaacatacccggcggtttcgaaaaagttacttggtgactggagcaaggaaaatgcactccccgttgtcacaggcttccttggaaagggatggagatcttgtgctgtaactacgcttggtagaggaggtagcgatttgactgcaacaacgatcgggaaggctttaggtttgcgggagatccaggtttggaaagatgtggatggagttttgacttgtgatcctaacatttactgcggagctcaacctgttccacacttgacatttgatgaggctgctgaacttgcttactttggtgcccaggtgttgcatccactttccatgcgcccagcgcgagaaggtaacattcctgtaagggttaagaactcttacaatcccactgctccaggaactgtcatcaccagatcaagagacatgagcaaggctgtattgaccagcatcgttctgaaacgtaatgtcaccatgttggacatcactagcacccgtatgctcggccaatatggtttccttgccaaggtgttttccacatttgaaaagttgggcatatctgtggatgttgttgcaaccagcgaagttagcatttctttgacattggatccttcaaagttctgtagcagagagttaattcaacacgagcttgatcaggtggtggaggaacttgagaagattgctgttgtaaatctgcttcgacacagatcaattatctctctcatcggaaatgttcagagatcatcattcatattagagaagggcttccgagtacttcgaaccaatgggattaatgtccagatgatctcccaaggtgcatctaaggtaaacatctcactgatagtgaatgatgatgaggcggagcattgtgtgaaggctctccactcggccttctttgagacagacacttgtgaagcagtctcagaatgcccgaccggctacatcgctgcctcttcgtgaaacctctaggtgcaacctgcaaggtctgaaagtactagctagtttgatgttatgattcttgtcagactggtattaggaaacaaagctcccattctccttgtgtaatataatgtaatttgattgggagatgtactggaaaatcaataagttttcctatttgaatatatgattaggactgcctacaacatcagtt

SEQ ID NO: 94 - DNA, 3043 bp, Arabidopsis thaliana
  source 1..3043: mol_type = genomic DNA
atgagatctcttctctttgtactatcactcatttgcttttgctctcaaacagcactttcatggaagaaggaagagtttcgcagctgtgaccaaactccattttgtaaacgcgctcgatctcgtactcccggcgcgtgttctctaattgtcggcgatgtttccatcactgatggagatctcgtagcgaagcttctaccgaaagcgcctaatcaaggcgatggggatcagatcaagccgttgattctttctctctcagtttacaaggatgggatcgtgcggcttaaaatcgatgaggaccattcgttgaacccgccgaagaagaggttccaagttcctgatgtggtagtgtctgagtttgaggagaagaagatctggctgcagaaagtagcgacggagacgatctctggagacactagtccgtcttcagtagtttatgtatccgatggttacgaggcggtggtgcgacacgatccgtttgaggtgtatgtgcgtgagaaatcaggtgatcgccgtcgcgttgtgtcattgaattctcatggattatttgattttgagcagttggggaggaaaactgaaggagataactgggaagagaaatttaggactcatacagattctagaccatctggtcctcaatctattagtttcgatgtttcgttttatgattccagtttcgtttatggaattcctgaacacgccactagcttcgcgttgaagcctaccaagggtcctggagttgaggaatctgaaccctacaggctttttaatctagatgtgtttgaatacgatcatgaatcaccgtttgggctttacgggtcgattccgttcatggtttcgcatgggaagtctggtaaaacttcaggatttttctggttgaatgctgcggaaatgcagattgatgtgttggctaatggttgggatgcagagagtggtatttctttgccttctagtcacagtaggatcgacacattctggatgagcgaggcagggattgtggatacattctttttcgttgggcctgagccaaaggatgttgtaaagcagtatgcaagtgtgacaggtacttcagccatgcctcagttgtttgccactggttatcatcaatgtaggtggaactacaaagatgaggaggatgtggcacaggtggactcgaaattcgatgaacacgatattccttatgatgttctctggcttgacattgagcatacagatgggaagagatactttacatgggatagtgtgttgtttcctcatccagaggagatgcaaaagaaattggctgcaaagggtaggaagatggtgaccattgtggatcctcatatcaagagggatgactcatacttcttacacaaagaggctactcagatgggatactatgttaaggattcatctggaaaagactttgatggttggtgctggcctggttcatcatcttacattgatatgttgagcccagagattagaaaatggtggggtgggaggttctcgtataagaactatgttggttcaactccatcattgtacacctggaatgacatgaatgagccttctgtattcaatggtcccgaggttactatgccaagagatgcattacatgttgggggtgttgaacacagagaagttcataacgcatatggatattacttccacatggcgacttccgatggacttgttatgcgtgaagaaggaaaggataggccttttgtattgtcaagagcaatctttcccggcactcaaagatacggagcaatttggactggagataacacagccgaatgggaacaccttagagtctccattccaatgatattgacacttggtcttactggaattacattctctggagctgatattggtgggttttttggaaatcctgaaccagaacttctagttaggtggtaccaagtgggtgcttactatccatttttcaggggtcatgctcatcacgataccaaaagacgagagccttggttgtttggtgaacggaacacagaactcatgagagatgccatacacactcgttacacactgctcccatacttctacacgttgttcagagaagcaaacgttacgggtgttcctgttgtacgcccattatggatggaattcccgcaagatgaagctacttttagcaacgatgaagccttcatggtcggtagtggtctactggttcaaggagtttacaccaagggaacaacgcaagcttccgtgtatttgcctggcaaagaatcatggtatgacttgagaaacggtaagacttacgttggaggcaagactcacaagatggatgctccagaggagagtattcctgcgtttcaaaaggcaggaaccatcatcccaaggaaggaccggtttaggcgaagttcctctcaaatggacaatgatccttatactttggtggtagctttgaacagttctcaagaagcagaaggtgaactctacatcgatgacggcaaaagctttgaattcagacgaggctcttacatccatcgtcgcttcgtcttctcaaagggtgttcttacatcaacgaacttagctcctccagaagctcgtctctcttcccaatgcttgatcgacagaattatcctcttgggacacagctcaggtccaaaatctgcgttggtggaaccgttgaatcaaaaggcagagattgagatgggacctctgcgaatgggtgggcttgtagcttcctcgggtacaaaggtgttgactatccgcaaaccgggtgttcgagtggaccaagactggaccgtaaagattctgtgattgaacggtttgaaccagtttcactcatggccgttagagtggccgaaatctgcttttccggcgacggaatatcacactttttaatatatgtttggagatttagacttaaatagttgtaagagctaacagtttgaaagtcactttgcattgttgtttatcttcatataaatgagtttagattttgataatttcagaattcgtggaatcataattaacaattttgatagggaaaaataatttgttttttttagtcagagggtcaaataatcttaccttc

SEQ ID NO: 95 - DNA, 787 bp, Arabidopsis thaliana
  source 1..787: mol_type = genomic DNA
attttttctagggtttcctcttccgcattcgtcgtcttcagctcctcctacacagtttcttctctgaatctacttaggaagctaaaatgggtagatgtccgactagaaaagtgaagaagaggagattatctcacaaaacagctcgccgtgacaaattcgaagtcaaaggcgatgacttggtttacacagagttgcgtaaaccggagacggagattaagccgttacagcttgacgaggatttgcctggaatgggtcaattctactgcttacactgcgatcgatacttctccaacgtatcagtgagggatgatcatttcaagactaagaaacacaagaagcgtgtgaatatgatgatgggacaagcgccacactcgcaactcgatgcagatttagccgggggaatggggatgccggacaatggcccaaagctgatgtctaatttggtattcacagagttgcgtaaaccagagacggaggatttacctggaatgggtcaattcaactgcttactctgccatcggaacttctccaatgcatcagtgatggattatcatttcaagactaagaaacacaaaaagcgtgtgaagaagatagagcgaccagcgccacactcgcaactcgatgcagatttagctggtggaatgggaatgccagacaatggtccaaagctgatgtctgcctgagtttttacagttattttccttatttagttaatggaacccgaaattttgttgtaaaactataatctcctaaattaatgatacaggttttttgtctgttgccaagt

SEQ ID NO: 96 - DNA, 1397 bp, Arabidopsis thaliana
  source 1..1397: mol_type = genomic DNA
aaaataatggcttcgcccgggttcgaaccggagaccttcagtgtgttagactgacgtgataaccaactacaccacgaaacctacatgcttctttctaacctcaacaatatatatatacatatagataactgtttaatattgtaacttgtaaccagtgtcggctaatttcgacttttgtagatctttttctgctctttctctctctctctctctctctctctctctctctctctctcttgtattatttctatctcccccgccgtcgaaagagaaacgtcgatcggagaacctttgaaatgtcgactggattagatatgtctctcgacgacatgatcgccaagaaccgtaagtctcgtggtggagccggccccgctcgtggaaccggatccggatccggaccgggtccgactcgccgcaacaaccctaatcggaaatcaacccgatctgctccataccaatcagccaaggcgccggagtccacctggggtcacgacatgttctccgatagatctgaagatcaccgatcgggacgttcctccgccggaatcgaaactggaaccaagctctacatttccaatttggattacggtgtcatgaacgaagacatcaaggaactgtttgctgaagttggagaacttaaacgctacacagttcattttgatagaagtggaagatcaaagggaactgctgaagtagtgtattctcggcgtggcgatgcactcgcagctgtgaagaagtataatgatgttcagctggatggaaaacccatgaagatagagattgtgggcactaatcttcaaactgctgcagccccgtctggtagacctgcgaatggaaactccaatggtgctccatggagcagaggaggacaagggagaggaggtcaacaacgaggtggtggacgaggaggcggtggccgaggtggtggtggtcgtggtaggcgtcctggtaagggccctgcagagaagatttctgcggaagatcttgatgcggatcttgataagtaccattctggagatatggagacaaactaaggaacgtgactgatcttctcaaaccggtaggggttttaggaggaagagaatcgagaaaatgtttgccagaggctttaccacttagcgcctttttggctgtgttgttcatttgtttcattagaatgactttacagaattgagaatatgtgttatttaaagttgttgtctatcttaataccctcaagtgaaaggcagaggaaggaataccaatttcgtttacagatcatatgcaggcaaaagagttttcagaaatcaggtttagttacttgtattgtgtctcttatccaagccatgccttgtggtattatgagcgcagaattttgattgaatattgttcatttgcattaaagtatcaaaccattt

SEQ ID NO: 97 - DNA, 636 bp, Arabidopsis thaliana
  source 1..636: mol_type = genomic DNA
aaaactcctccgtaaaaccctttcatttgcatttgggaatcgattgctcttcttcgtagtcgcctttgaattcgcagagtgagaagcaatgaaggtgagatcatctgtgaagaagatgtgtgagttttgtaaaacagtgaaacgtcgtggacgtgtgtatgttatatgctcttccaatcctaagcacaagcaaagacaagggttcagttcctttgcttatgaaggaattacaccttcccctttgtttgctgagccgattgctagtcaggagttggtgaggctgcctggtcagggggtatcagccggactggcatcacttttacacaaaaggcctatgccaacagcgtatttcggatggaggtctggtcttgcatccattctcttcaaacaaggaaattaggatgtcagcatttccctttttattcttcagatttgtaatcgcagttttcttccaattcctatgaaacattattgtatatctctccacttttactttggtcagtcgtatgctccttcgagacctgtttgattgtgcctcgcatgacctgaacaaagagatatattatgacactcgagtatttgtttttacattttccactggagcatatgttagggatcaatatgtttttcttttag

SEQ ID NO: 98 - DNA, 666 bp, Arabidopsis thaliana
  source 1..666: mol_type = genomic DNA
tgctcttcttcgtagtcgcctttgaattcgcagttagagatggatgcttcagattcgttttacttttgcttccatcatcggatcaactaaggattgcagtttttctgagtgagaagcaatgaaggtgagatcatctgtgaagaagatgtgtgagttttgtaaaacagtgaaacgtcgtggacgtgtgtatgttatatgctcttccaatcctaagcacaagcaaagacaagggttcagttcctttgcttatgaaggaattacaccttcccctttgtttgctgagccgattgctagtcaggagttggtgaggctgcctggtcagggggtatcagccggactggcatcacttttacacaaaaggcctatgccaacagcgtatttcggatggaggtctggtcttgcatccattctcttcaaacaaggaaattaggatgtcagcatttccctttttattcttcagatttgtaatcgcagttttcttccaattcctatgaaacattattgtatatctctccacttttactttggtcagtcgtatgctccttcgagacctgtttgattgtgcctcgcatgacctgaacaaagagatatattatgacactcgagtatttgtttttacattttccactggagcatatgttagggatcaatatgtttttcttttag

SEQ ID NO: 99 - DNA, 1991 bp, Arabidopsis thaliana
  source 1..1991: mol_type = genomic DNA
attccttgcttcatttttcgtcaccctagccgctttactctcttgcgatatctctgaggtaattctggagcagcataaacaatcaattgattcattcttcttgataccaagttgtggaaactctaggattgtttgctgtatatctccagaattgctgttttgattgaatttaggtcgcttagctcagttgatagagcaccacattttttgtggtagaaatcgatttgtttgacagtctctaaccatgggtaaagagaagtttcacatcaacattgtggtcattggccacgtcgattctggaaagtcgaccaccactggacacttgatctacaagttgggtggtattgacaagcgtgtcattgagaggttcgagaaggaggctgctgagatgaacaagaggtccttcaagtacgcatgggttttggacaaacttaaggctgagcgtgagcgtggtatcaccattgacattgctctctggaagttcgagaccaccaagtactactgcactgtcattgatgctcctggccatcgtgatttcatcaagaacatgatcactggtacctcccaggctgattgtgctgtccttatcattgactccaccactggtggttttgaggctggtatctccaaggatggtcagacccgtgagcacgctctacttgctttcacccttggtgtcaagcagatgatctgctgttgtaacaagatggatgccactacccccaagtactccaaggccaggtacgatgaaatcatcaaggaggtgtcttcctacttgaagaaggttggttacaaccccgacaaaatcccatttgtgcccatctctggatttgagggtgacaacatgattgagaggtccaccaaccttgactggtacaagggaccaactctccttgaggctcttgaccagatcaacgagcccaagaggccgtcagacaagccccttcgtctcccacttcaggatgtctacaagattggtggtattggaacggtgccagtgggacgtgttgagactggtatgatcaagcctggtatggttgtgacctttgctcccacaggattgaccactgaggtcaagtctgttgagatgcaccacgagtctcttcttgaggcacttccaggtgacaacgttgggttcaatgttaagaatgttgctgtcaaggatcttaagagagggtacgtcgcatccaactccaaggatgaccctgccaagggtgctgctaacttcacctcccaggtcatcatcatgaaccaccctggtcagattggtaacggttacgccccagtcctggattgccacacctctcacattgcagtcaagttctctgagatcttgaccaagattgacaggcgttctggtaaggagattgagaaggagcctaaattcttgaagaatggtgatgctggtatggtgaagatgactccaaccaagcccatggttgtggagaccttctctgagtacccaccacttggacgtttcgctgtgagggacatgaggcagactgttgcagtcggtgttatcaagagtgttgacaagaaggacccaactggagccaaggttaccaaggctgcagtcaagaagggtgccaagtgaactctgaacatcaaaactctttccgctgatgaaatgaaggactattttagtttctttactttagtagtttggtatttggttggttgtttgtgttaccgcttcgtttattctccgtcggagctcaattctcggaattgggttcttgatcggaggtggcggaggtacttggcactcgagcttcctgtttatttcttttgttttgtgttatgattttgaacctttttggatattcggttatatgatatttgtgtcattcctgcggatattatcttatcttatcaacttaagtctgtttttcttctctaaaattcaacgatcagcctctgaagtttcttacatggtaaaattgtaatctagaactttaaacaacattggagaaacaagtctatatcagttt

SEQ ID NO: 100 - DNA, 1408 bp, Arabidopsis thaliana
  source 1..1408: mol_type = genomic DNA
tcatgatccttaatcttagctcctagggtttctgtgaattagtctaattttacaattttatgcctttgaggatatatcttaatgtgaaagttttaaacttgtaactcaaaaaccatttgttagttagtaatcatcatcattctgaattgagctttgtttgaatttgagtagggcaacgaaagattcaagttagttgcggtggtaagagtgaggtgttgaagagtgatacaatggaacctcatgaagcagaaacgtttgtgaacaagagaaccctttatgctcccattgagccatatagcagtggaaatttaaaggtttcagatgttcacactctctactgggagcaatcaggcaaacccgatggacacccggttgtttttcttcacggcgggccgggaggagggacggctcctagtaataggagattcttcgatccggagttttatcggattgttctgtttgatcagagaggtgcggggaagagtacaccgcatgcttgtttggaggaaaacaccacatgggaccttgtgaatgatattgaaaaactaagagaacatttgaaaatacctgaatggctggtttttggaggatcatggggaagcactctagctcttgcatacagtcagtctcaccctgacaaggttactggtttggtccttagagggatctttttgttgcgtaaaaaggagattgactggttttacgagggcggtgctgctgctatttaccctgatgcttgggaggagttcagagatcttattccagaaaacgagagaggtagtagccttgtggacgcgtatcacaaaagattgaattctgatgatctggaaattcaatacgcagctgcaagagcttggactaaatgggaaatgatgactgcttatcttcgtccaaatcttgaaaacgttcaaaaggcagaggatgataaattttcattggcgtttgcaaggattgaaaatcactactttgttaacaaaggtttcttcccgtcggactcacacttgctagacaatgttgataaaatacgacatatcaagaccaccattgttcagggaaggtatgacgtatgctgtcctatgatgtctgcttgggatctgcacaaagcatggccagaggcagaactcaagattgtttatgatgctgggcactcggcaaatgagccaggaatatcagcggaactcgtggttgccaatgaaaagatgaaagcacttatgggatgaagtatttgatggaatgaaagctgctcattttgttcatttctttgggacctttgttcatattttcaagtttgttgctgcaaagtaaatatcacattcagagttagttgttaacgcgaaaccgaatgttatttccatggacgtttatacccaaatgaaaaagacaatgacataggtgcagtgttttgaaa

SEQ ID NO: 101 - DNA, 1213 bp, Arabidopsis thaliana
  source 1..1213: mol_type = genomic DNA
acagagttcagaatatcgacggcgacaatttctctctccggctaacttttttctagagaaagctatggcggacgaagaagatgagttactggagacagaactaagttacgaccagaaaaaggaaatcgccaagtggtttttcctcaacgctcccgctggagaaatcaattacgtcgctaaagatttaaaggcggttttgagcgatgaggaagtgtacaatgaagcagccatggaagcatttccagtgtacaacaaaactcacatgatttgccttgaaatgcccagtggagctggtgatgtgattgtctcatcttacagtgaaattaatgaaaatgagtaccttgatccaagaactgcccaggttgccatagttgatcatgttaaacagatttgtacaaaggtacggcctgcaaatgatgaagaacttccttctttgtatattgaggagtacagatatgctcttgatgctgaaatccagagatatgttagtgaatcttatccgaaaggtatgtctgcagttaattgtgtgaaagggaaagataatgagggtccagggtccgactttgagcttgttgttataattactgctatgagacttagtccccagaacttctgtaatggaagttggagatctgtatggaacatagatttccaggatgaatcccaggtgcttgacataaaagggaaattgcaggtaggagctcattattttgaagagggaaatgtggaattagatgcaaaaaaagatttccaagattcaacaatatttcagtctgcagatgactgcgcgattgccatagccaatattatcaggcaccatgaaacagagtaccttgcatctctagaggtagcttattcaaaattaccggataacactttcaaggatttgaggaggaaacttccggtgacacgaactctgttcccatggcagaacactttacagttcagcctaacaagagaggtcgagaaagaacttggacttggcaagataagtattatttctgttgtgtcttgtctttcctttggagtaatgtatacaaatcgcattagtaagtatgatagatattgttccgcaagccgcatgaaagaattgaagtttggtcccaaaaagagctccgttgccgggaatcgaacccgggtctcctgggtgaaagccagatatcctaaccgctggacgacaacggatatgttattggaactgttaaagaactaa

SEQ ID NO: 102 - DNA, 2160 bp, Arabidopsis thaliana
  source 1..2160: mol_type = genomic DNA
ctcgtctccttctccacttggatctcaaaagtccgatccaaaaccaaatccgccataactctctctctctctcccacttcccacagagagacacattcatgccagcaatgccaggtctcgtctcagtcaaaactccttccgatacaccgccgctacgtgtagccgtaccagacacgcaacctctctcaaacccgccgcgaactccgatgaagaaaaccccttcctctacaccatctcgatccaaaccatcaccaaatagatccaccggcaaaaaagattccccaaccgtatcctcctccaccgcagccgtaatcgacgtcgacgatccatctctagataatccagatctcggtcctttccttctaaaattagctcgtgacgctattgcttctggtgaaggtcctaacaaagcattagattacgcgatccgagcaactaagtcctttgagagatgttgcgccgccgttgctccgcctattcccggtggtagcgatggtggacctgttcttgatctcgctatgagccttcatgttctcgctgctatttactgtagtctcggccgatttgatgaagctgtaccacctcttgaacgagctattcaagtccctgatccgactcgtggccctgaccactctctcgctgcgttttctggtcatatgcaacttggtgatacgttgtctatgcttggtcagattgatagatctattgcttgttatgaagaaggtcttaagatccagatccagactttgggtgatactgatccacgagttggtgaaacttgcaggtacttagcagaagcatatgttcaagcaatgcagttcaataaagcggaagagttatgcaagaagactctagagattcaccgagcgcatagtgaacctgcttcactggaggaagcagctgataggagattgatggcaattatctgcgaggctaaaggagattatgaaaacgctcttgagcatcttgttcttgctagtatggctatgattgcgagtggacaagaatctgaggttgcatcgattgatgttagtattgggaatatttacatgtcgctgtgccggtttgatgaagctgtgttttcatatcagaaggctcttactgtgtttaaggcttctaaaggagagactcatccgacggttgcgtcagtgtttgttagattggctgagctttaccatagaacagggaaacttcgtgagtctaagtcttactgtgagaatgcgttgaggatatacaataagccggtgcctgggacaactgtggaggagattgctggtggattaactgagatttctgctatttatgagtctgtagatgaacctgaggaagcattgaagctacttcagaagtctatgaaattgcttgaggataagccaggacagcagagcgccattgcagggttagaggcacggatgggagttatgtattacacagtggggaggtacgaggacgcaagaaacgcgtttgagagcgctgtgacaaagctacgggcagcaggtgagaaatctgccttcttcggtgttgtattaaaccagatgggactagcctgcgttcagcttttcaagattgatgaagcgggtgagctgtttgaagaagcaagaggtattcttgaacaagaacgtggaccgtgcgatcaggacactctcggtgtttatagcaatctagctgctacctatgacgctatgggaaggatagaggatgcgattgagatattagagcaggttctgaagctgagagaggaaaagctcgggactgcgaatccggattttgaagacgagaagaaacgtttggccgagcttttgaaggaagctgggcggtcgcggaactacaaagccaagtcgctccagaatctgattgatccaaatgcaagacctccgaagaaagagtcttctgctaagaaatggcccagcctcggtttcaagttctgaggaaaaaattatcatataaaataaatcatccacatatatattcaatattttattttattgttattgttatattttttatctgatctattttctgtatcataatctgaggttgatgaattaatttcatgtatagtgtttttatttgagtttggtgaaatactgccaagatggtgagctgtttgtttgagtttgaaatttctttaattcaatcacttttttcttcttctgataa

SEQ ID NO: 103 - DNA, 2248 bp, Arabidopsis thaliana
  source 1..2248: mol_type = genomic DNA
ctcgtctccttctccacttggatctcaaaagtccgatccaaaaccaaatccgccataactctctctctctctcccacttcccacagagagacacattcatgccagcaatgccaggtctcgtctcagtcaaaactccttccgatacaccgccgctacgtgtagccgtaccagacacgcaacctctctcaaacccgccgcgaactccgatgaagaaaaccccttcctctacaccatctcgatccaaaccatcaccaaatagatccaccggcaaaaaagattccccaaccgtatcctcctccaccgcagccgtaatcgacgtcgacgatccatctctagataatccagatctcggtcctttccttctaaaattagctcgtgacgctattgcttctggtgaaggtcctaacaaagcattagattacgcgatccgagcaactaagtcctttgagagatgttgcgccgccgttgctccgcctattcccggtggtagcgatggtggacctgttcttgatctcgctatgagccttcatgttctcgctgctatttactgtagtctcggccgatttgatgaagctgtaccacctcttgaacgagctattcaagtccctgatccgactcgtggccctgaccactctctcgctgcgttttctggtcatatgcaacttggtgatacgttgtctatgcttggtcagattgatagatctattgcttgttatgaagaaggtcttaagatccagatccagactttgggtgatactgatccacgagttggtgaaacttgcaggtacttagcagaagcatatgttcaagcaatgcagttcaataaagcggaagagttatgcaagaagactctagagattcaccgagcgcatagtgaacctgcttcactggaggaagcagctgataggagattgatggcaattatctgcgaggctaaaggagattatgaaaacgctcttgagcatcttgttcttgctagtatggctatgattgcgagtggacaagaatctgaggttgcatcgattgatgttagtattgggaatatttacatgtcgctgtgccggtttgatgaagctgtgttttcatatcagaaggctcttactgtgtttaaggcttctaaaggagagactcatccgacggttgcgtcagtgtttgttagattggctgagctttaccatagaacagggaaacttcgtgagtctaagtcttactgtgagaatgcgttgaggatatacaataagccggtgcctgggacaactgtggaggagattgctggtggattaactgagatttctgctatttatgagtctgtagatgaacctgaggaagcattgaagctacttcagaagtctatgaaattgcttgaggataagccaggacagcagagcgccattgcagggttagaggcacggatgggagttatgtattacacagtggggaggtacgaggacgcaagaaacgcgtttgagagcgctgtgacaaagctacgggcagcaggtgagaaatctgccttcttcggtgttgtattaaaccagatgggactagcctgcgttcagcttttcaagattgatgaagcgggtgagctgtttgaagaagcaagaggtattcttgaacaagaacgtggaccgtgcgatcaggacactctcggtgtttatagcaatctagctgctacctatgacgctatgggaaggtaaagtcctaaagaaaactatctgactatgtaattagatcagacatccttaatgaaacattaaagtctttcttcgtgatggctatgtaatttgcaggatagaggatgcgattgagatattagagcaggttctgaagctgagagaggaaaagctcgggactgcgaatccggattttgaagacgagaagaaacgtttggccgagcttttgaaggaagctgggcggtcgcggaactacaaagccaagtcgctccagaatctgattgatccaaatgcaagacctccgaagaaagagtcttctgctaagaaatggcccagcctcggtttcaagttctgaggaaaaaattatcatataaaataaatcatccacatatatattcaatattttattttattgttattgttatattttttatctgatctattttctgtatcataatctgaggttgatgaattaatttcatgtatagtgtttttatttgagtttggtgaaatactgccaagatggtgagctgtttgtttgagtttgaaatttctttaattcaatcacttttttcttc

SEQ ID NO: 104 - DNA, 1337 bp, Arabidopsis thaliana
  source 1..1337: mol_type = genomic DNA
ttaaagtaatgacttttttttatatgatatattctcaattttgttactcggaaacaatagaaaggataacgaatcgtttctcttcgatcgaaagaatatatatttggaagttttctctgcttttttgttttcgtttgatagaatgggaacagttctcgattcgcattttctggctctcactgctattgtcactgtgatttaccagttcatattcttcgtaatcacggctcttttcaaatttgatcaagtcactgactttgctggtagcacaaacttcgttatacttgctgtgttaacacttgttctcaaagcctcttggcattttcgacagatagtattgactttgctagttgtggtatggggtcttcgcttggggattttccttctaatgaggatcttgcaatggggggaagatcgtcgctttgatgaacagcgtggaaatatagtgagactaatcattttctggactcttcaggctgtgtgggtttggacggttagcttacctttaacacttgttaatgcaagtgatggtggtggatctcttaaacccgcagatgttatcggttggactatgtgggttttcggtttcttgattgaagctgcagctgatcaacagaagctatcattcaaaaactctcctgaaaacagaggaaaatggtgtgatgttggagtctggaagtattcaagacatccaaactacttcggtgagatgttactgtggtggggaatctttgtggctgcatcgcctgtgcttgaaggtgcagagtatcttgtcatattcggaccactctttctcactttgctacttctattcgtcagcggcataccattactcgaggcatcggctgacaaaaaacatggaaactcaggagcttacagatcctacaagaagacaacaagtcctctgattctgttcccaagaggagtgtatgggaacttaccaggatggttcaagacggtctttctcttcgagtttccattttacagccgaaatctccctcaagagggtagactccaaaacagcaaagagaaagaagtaaaagatgactgatttgtgatactcatatttgagttattgttcttcacaacactctttgataaaatttgtgtaaaaaattgcccgtaagaaactgaatttgtttgaaatattggacagtcttgacagattatctcagttgtatttggttcttttttttatgtgattttgttttttggttaaaaaaagttcccattccaagaatcgaacccgggtctcctgggtgaaagccaaatatcctaaccgctggacgacatcggatttgattatttgattatttaattactttatatgttgattt

SEQ ID NO: 105 - DNA, 1079 bp, Arabidopsis thaliana
  source 1..1079: mol_type = genomic DNA
gaagagtaagagtaaaaaacaaaaccttcgtctctaacaaatgtgtggcagctgattgaaactagtagtggtgaaggagaaggagaatgggagatctctacgctttggacttcgatggagttctctgtgatagttgtggagaaagctctctatctgctgttaaggcagccaaagtgagatggcctgatttgttcgaaggagttgattccgctttagaggaatggatcgtcgatcaaatgcatattgtgagacctgtggttgaaactggctatgaaaatcttctacttgtgcggctgttattggagaccaagataccgtctattcgaaaatcttcagttgcagaggggttgacggttgatgggatactggagagctgggcaaagtttaagcccgtgatcatggaagcttgggatgaagatagagatgctttggtagatttgtttggaaaagttagagatgattggattaacaaggacttgacaacttggattggtgccaatagattctacccaggagtttcagatgcactgaaatttgccagctcaaagatttatatcgttaccacgaaacagggccgctttgcagaagcgttactgcgtgaaatagcaggtgtaatcataccatcagaaaggatttatggtttgggttcagggccaaaggtggaagttctaaagctacttcaagataaaccagaacatcagggcttgacgctgcatttcgtggaagacagactcgcaacgctgaaaaatgtcataaaagagcctgaattagacaaatggagtttatacctaggaacctggggatacaacactgagaaagagagagctgaagcagcaggcattcccaggattcaggttattgagctctccacgtttagcaataagcttaaatgagtgcatatactcattggaaaagaaacaaagctttcctctttattgtattctacggcattcaacggaaactaaaaaccaaacatgtttaggtaagattcagtaaaagagttgaactttcagtactacccattatagaagcttttctgtgacctataattcatccttagtaagatcattcttgttacc

SEQ ID NO: 106 - DNA, 1064 bp, Arabidopsis thaliana
  source 1..1064: mol_type = genomic DNA
gaagagtaagagtaaaaaacaaaaccttcgtctctaacaaatgtgtggcagctgattgaaactagtagtggtgaaggagaaggagaatgggagatctctacgctttggacttcgatggagttctctgtgatagttgtggagaaagctctctatctgctgttaaggcagccaaagtgagatggcctgatttgttcgaaggagttgattccgctttagaggaatggatcgtcgatcaaatgcatattgtgagacctgtggttgaaactggctatgaaaatcttctacttgtgcggctgttattggagaccaagataccgtctattcgaaaatcttcagttgcagaggggttgacggttgatgggatactggagagctgggcaaagtttaagcccgtgatcatggaagcttgggatgaagatagagatgctttggtagatttgtttggaaaagttagagatgattggattaacaaggacttgacaacttggattggtgccaatagattctacccaggagtttcagatgcactgaaatttgccagctcaaagatttatatcgttaccacgaaacagggccgctttgcagaagcgttactgcgtgaaatagcaggtgtaatcataccatcagaaaggatttatggtttgggttcagggccaaaggtggaagttctaaagctacttcaagataaaccagaacatcagggcttgacgctgcaactcgcaacgctgaaaaatgtcataaaagagcctgaattagacaaatggagtttatacctaggaacctggggatacaacactgagaaagagagagctgaagcagcaggcattcccaggattcaggttattgagctctccacgtttagcaataagcttaaatgagtgcatatactcattggaaaagaaacaaagctttcctctttattgtattctacggcattcaacggaaactaaaaaccaaacatgtttaggtaagattcagtaaaagagttgaactttcagtactacccattatagaagcttttctgtgacctataattcatccttagtaagatcattcttgttacc

SEQ ID NO: 107 - DNA, 1133 bp, Arabidopsis thaliana
  source 1..1133: mol_type = genomic DNA
gcagctgattgaaactagtagtggtgaaggagaaggagaatgggagatctctacgctttggacttcgatggagttctctgtgatagttgtggagaaagctctctatctgctgttaaggcagccaaagtgagatggcctgatttgttcgaaggagttgattccgctttagaggaatggatcgtcgatcaaatgcatattgtgagacctgtggttgaaactggctatgaaaatcttctacttgtgcggctgttattggagaccaagataccgtctattcgaaaatcttcagttgcagaggggttgacggttgatgggatactggagagctgggcaaagtttaagcccgtgatcatggaagcttgggatgaagatagagatgctttggtagatttgtttggaaaagttagagatgattggattaacaaggacttgacaacttggattggtgccaatagattctacccaggagtttcagatgcactgaaatttgccagctcaaagatttatatcgttaccacgaaacagggccgctttgcagaagcgttactgcgtgaaatagcaggtgtaatcataccatcagaaaggatttatggtttgggttcagggccaaaggtggaagttctaaagctacttcaagataaaccagaacatcagggcttgacgctgcagtaactcacgttctatatatctatcaataattcttctatctgcatgacttggtaatggtcaccattagtttacaatccctatgcatttttaatttggccagtttcgtggaagacagactcgcaacgctgaaaaatgtcataaaagagcctgaattagacaaatggagtttatacctaggaacctggggatacaacactgagaaagagagagctgaagcagcaggcattcccaggattcaggttattgagctctccacgtttagcaataagcttaaatgagtgcatatactcattggaaaagaaacaaagctttcctctttattgtattctacggcattcaacggaaactaaaaaccaaacatgtttaggtaagattcagtaaaagagttgaactttcagtactacccattatagaagcttttctgtgacctataattcatccttagtaagatcattcttgttacc

SEQ ID NO: 108 - DNA, 700 bp, Arabidopsis thaliana
  source 1..700: mol_type = genomic DNA
acatcttctcttttcttccccagcaaaaaatgagtctgcaaaatagaaaattcaagctgcgattgcgaggaagagaagagacttcagatctagcttgatccggtgataatggcgctcgagtgggtggttttaggttacgcggcggcggctgaagcgattatggtggtgctattgacgatgccaggactcgacggactccgcaagggattagtcgccgtcacgcgtaatctcctcaaaccgtttctctccatagttcctttctgtctcttcctcttaatggacatctactggaaatacgaaactatgccttcgtgcgatggcgattcctgcacaccgtcagagcatcttcgtcaccagaagtccatgatgaaatcccagcgaaacgcgcttctcattgcggctgcacttgtgttctactggatcctttactcagtcaccaatttggttgtcaagatcgagcatcttaaccagaggatcgagaggctcaggaacaaggattgatcgtctcgtctcaggttcaattagtgtaatgccttttttggttatctttcccatttggctaggttttctctttttcaacgtttctgatatgtgtcttttatcttgtggagattgaaggattttatcctacttttctatgtttggattcttatttgtaaccagattgtgattgtttcttgttgaattttgattgactcta

SEQ ID NO: 109 - DNA, 1754 bp, Arabidopsis thaliana
  source 1..1754: mol_type = genomic DNA
tctccacaaacaaacttgtactagaaaaatccctaaatctcaacaaaaccctaatttcaaggaagacgaagaaagaatgagttacagagtcgctaaagcatcgcagtatcttgcgatcaccggtggtgggatcacagacatcaagcttgcaaagaagtcttgggtgtttccatggcagtcttgcaccgtcttcgacgtttctccggtgaactacacgttcgaggttcaagctatgagttccgagaaacttccctttgttattcctgctgttttcacaatcggtcctcgcgttgatgatcctcacgctctcttgttgtatgccatgcttatgtctcaacacgataagcactcgaatcacgtcaatgagcttgttcagggtgttatcgaaggagagactcgtgttcttgttgcttccatgactatggaagaggtcttcaaaggaacaaaggagtttaagaaggaagtgtttgacaaggttcagctagagctaaaccagtttggtcttgtgatctacaacgccaatgtgaagcagcttgttgatgtgcctggacatgagtacttctcttacttgggccagaagactcagatggaagcagcaaaccaagccaagatcgatgtagcagaggcaaagatgaagggagaggttggtgccaaagaaaggactggactcacaatccagaatgcagccaagattgacgctgagtcaaagatcatctctactcaaaggctaggagaagggacaaaagaggagatcaaggtgaagactgaagtcaaagtgtttcagaatgagaaagaggctcttgttgctaaggctgatgcagcacttgcgattcaaaaggctgctttgtcccaaaactctcgtgtggctgaggttgaagcagccaaggctgttgctttgagggaagctgagcttcagactaaagtagagaagatgaatgcattgactcggacagagaagcttaaagctgagttcctcagtaaagccagtgttgagtatgaaactaaggtgcaagaagcgaactgggagttgtacaataagcaaaagcaagcagaagctgttctttacgagaagcagaagcaagcggaagcgacgaaagctgcagctgatgctgccttctattcaaaacagaaagatgcagagggacttgtcgcaatggccgatgctcaggggacttacctcaagaccctcttaggcgcagttaacaatgattactcagccatgagagacttcttgatgatcaacaatggcatttatcaggatattgccaagaccaatgctgttgcgatcagggacctgcagcctaagatcagcgtgtggaaccatggtggtgctgagcaggggatgaacggtggtggtaaagctacgatgaacgatattgctggactctacaagatgttaccaccggttcttgatacggtttatgagcagacagggatgcagccaccagcttggattggtacattgcgtggtgctgagcccaaacaatcacttcatgctcaacaacacagaggttgagatctcaaatgttgcttctttaattatacttttagctgttggggtttgttttctttttcttatgttatagaacttggaagttagagtttgaagttaaaacaatagtatctgacaaatgcgacttcgactagtgatttcgataaggatgtgtttttcctttttcaaatgtcagatttattattgcgtgttgaagatacctttcttctctcttgatacactaatataaataacatgttta

SEQ ID NO: 110 - DNA, 683 bp, Arabidopsis thaliana
  source 1..683: mol_type = genomic DNA
cacagaaccctccctctctagctctaaaaacatcccacaaactatctttcaacaacacaagacatatcacgaaacaaatcaaagcaaagatcatgaacacgattccagccgaactcactggatacttccactatctaccaccagataaatataataaccaaacaccaatcatggagtctgagtacttcaacatgccctcttctcctacttcttgttcctccttctaccacctcaatggtctgatcaacaacaacaactactcttcatcatccaatggtcaggatctaatgacgagcaacaactcaacttcagacgaagatcaccaacaaagtatggtcatcgatgagaggaaacaaaggagaatgatctctaacagggaatctgctcgtaggtcaagaatgagaaagcagagacatctcgatgagctttggtctcaagtgataagacttcgcactgataaccactgtcttatggataagctgaaccgcgtatctgaaagccatgagcttgctttaaaggagaacgctaagcttaaagaggaaacttctgatctcagacagctgatctctgagataaagtcacacaacgaagacgacaacagttttttaagagagctcgaagattcgatatcaaactctagatcggattcgaaccaaagcggcagagattttgagttgtgttaa

SEQ ID NO: 111 - DNA, 432 bp, Arabidopsis thaliana
  source 1..432: mol_type = genomic DNA
taagctagaggtttttagttctctgtgtggagtacggctgcattgtttctaccagtaatttgtgggatttccaagctccagtttttcgaatatggcggaagtaagtcttggtatgcttatagacattgtggacgaagagtggatgagggacactttgcctgatgatgatcttccattgcctccagtgcttgctgttaaaactgatgatactgaagaaaccaatcaggaaactcagcaagcagatgctgaaacttggcgtgatctagctcttgatacacagtaatagcctcttaagtacaatggaaaattcttacaagtcttgtttctcgttgtgtatgatcaaaaccaaaactgttcctggctttgtatttttttttggtagaagaggggggcgaacccccatttttattaaaactgaaaaactaaaaaaaa

SEQ ID NO: 112 - DNA, 3538 bp, Arabidopsis thaliana
  source 1..3538: mol_type = genomic DNA
gaagtagaagaagagaagtatctggagagagagaggcgtgcgatttccgcatcgaagaaacagtacggagttttatccgctccgattctgtggaagataatggggaaaggaggtgaagattgcgggaataagcaaactaatagttctgaattggtcaagtctgatacttttcctgcttggggtaaagatgtgtcggaatgcgaagagaagtttggtgttagtcgtgagaaaggtttgagcactgatgaggtgttgaaacggcatcagatctatggtttgaatgaattagagaagcctgagggtacttctatttttaagctgattttggaacagtttaatgatacattggttcgtattcttttggcggctgctgttatttcctttgtcttagccttctttgatggcgacgaaggtggtgagatgggtatcaccgcatttgttgagccgcttgttatttttctcatcttgattgttaatgccattgttggcatctggcaagaaactaatgctgagaaggcgttggaagctttgaaagagattcagtctcagcaagctaccgtcatgcgtgatgggactaaggtttccagtttgcctgcaaaggagcttgttcctggtgatattgtggaactgagggttggtgataaggtgcctgctgatatgcgtgtggttgctttgatcagttcaactttgagagtcgagcaggggtccttaacaggagagagtgaggcagtgagcaaaaccaccaagcacgtggatgagaatgctgatattcaaggaaagaaatgcatggtgtttgcaggaaccactgtcgtgaatgggaactgcatatgtttagttacagatactgggatgaatactgagattggaagggttcactcacagatccaggaagctgcacaacacgaggaagatacccctctgaagaaaaaacttaacgagtttggggaagttctgactatgatcattgggttaatttgtgcgttagtgtggctcatcaatgtcaaatactttctgtcatgggagtatgttgatggctggcccagaaactttaagttctccttcgagaagtgcacatattactttgagattgctgttgcactggcggttgctgcaattccagaaggtctgccagcagttattaccacatgtttggctcttggcactaggaagatggctcagaagaatgctctggttaggaagctacccagtgtggagactcttggatgcaccaccgtgatatgctctgacaaaactggaactcttacaaccaatcagatggctgtttcaaagctcgttgctatgggttcgaggatcggaactcttcgatctttcaatgttgaggggacctcgtttgatcctcgagatggaaagattgaagattggccaacgggtcggatggatgcaaatcttcagatgattgcaaaaattgctgccatttgcaacgatgctaatgttgagaaatctgatcagcaatttgtgtctaggggcatgcctactgaggcagctttgaaggttttggttgagaaaatgggatttcccgaaggattgaatgaagcttcatccgatggcaatgtcttacgttgttgtcggctatggagtgaactagaacaacggattgccacccttgagtttgaccgtgaccggaaatcaatgggagttatggtggattccagctcaggaaagaaactgctactggtcaagggtgccgtagaaaatgtattggaaaggagtacccatattcagctacttgatggttccactcgagagcttgaccaatactcaagggatcttattttacaaagcctacatgatatgtccttgagtgcattaagatgtctcggatttgcatactcagatgttccatcagattttgccacttatgatggcagtgaagaccatcctgctcatcagcaacttctcaacccatccaattattcatcaattgagtccaatctagtatttgttggatttgttggtttaagggatcctccaaggaaagaggtgcgtcaagccattgcagactgcagaacagcaggtattcgggtcatggttatcaccggagacaacaagagcacagcggaagcaatctgccgtgaaattggcgtatttgaagcagatgaagatatctcctcgagaagcttgacaggaaaagaatttatggatgttaaagatcagaagaatcatctaagacagacaggagggctcctgttctcaagggctgaaccaaaacacaaacaagagattgtcaggttactgaaagaagatggagaagtggttgccatgactggagatggagtcaatgatgctcctgccctgaagttggctgatattggtgtggctatgggcatttccgggacagaggtagcaaaggaggcatctgacttggtgttggcagatgataatttcagcaccattgttgcagctgttggtgaaggcaggtccatctataacaacatgaaggccttcatcaggtacatgatctcttccaacatcggtgaggttgcatcgatattcttgacagctgctcttggaatcccagaaggcatgatacccgttcaacttctgtgggtgaatctcgtaacagatggtcctccagctactgctttgggattcaacccccctgacaaggatattatgaaaaagcctcctcgtaggagcgatgactctcttatcactgcgtggatcctcttccgctatatggtgattggtttgtatgtgggagtagcaacggtgggagtattcatcatatggtacacacacaacagctttatgggcatagacctgagccaagacggtcacagccttgtgagctattcacagctcgcacattggggccaatgctcttcatgggaaggcttcaaagtgtctcctttcacagcaggctctcagactttctcgttcgactcaaacccttgcgactattttcagcagggtaaaatcaaggcatccacactctccctctcggtgttggtggccattgaaatgttcaactctctgaatgcactctcagaagatggcagcctggtgacgatgccaccctgggttaacccgtggctgctcctggcaatggctgtctcatttggactccactttgtgatattgtacgtcccattcttggctcaggtgtttggtattgtgccactgagcttgaacgagtggctgctagtgctggctgtgtcgctgccggtaattttgatagacgaagtgctcaagtttgtaggaaggtgcacgagtggctaccgctactcacctcgcactccctcagctaagcaaaaggaggagtaagaaaataattcaaaaggcattattattagactcttagttttagctgaaattaactttgttgctttactcatccttgctatatttaattctccaaacgataatttttggtttgaaaaagaaaagtttctaactttggttcatggacacagcccgtgatagaaagatgaatgtttcaaccaaaccttgattctttatgtaaacttttatggtcgaccaaattggtttttaagactgatggtaatttattttgggc

SEQ ID NO: 113 - DNA, 2087 bp, Arabidopsis thaliana
  source 1..2087: mol_type = genomic DNA
ataaacctacttcctttccttgcttcagctccccttttcttatccggaaaccaaaaacttccggtgataaaacctccttcgtcatctctctacttcttgctgaattttgtctgtctttgaagtggataaaatggcgtcaactttcactgccacatcttctattggttcaatggttgctccgaatggtcacaaatctgataagaaacttatcagcaagttgtcttcaagctcatttggaaggagacaaagtgtgtgtcctagacccagaagatccagttctgcaattgtgtgcgcagcaaaggaattacatttcaacaaagatgggactaccattaggagacttcaagctggtgtcaacaagctcgcagatcttgttggtgttacacttggacccaaaggacgaaatgttgttcttgagagcaagtatggatcaccacgaattgttaatgatggtgtgactgttgcaagagaggttgagttggaagacccggttgagaacattggcgctaagcttgtgaggcaagcggctgccaaaaccaatgacttggctggtgacggtacaacaacatctgttgttcttgcacaaggttttatcgctgagggtgtcaaggtggtagctgctggtgcaaaccctgttttgatcaccagaggtattgagaagacagcaaaggctttggttaccgagctcaagaaaatgtctaaggaggttgaagacagtgaacttgcagatgttgcagctgttagtgcgggtaacaacgacgaaattggaaatatgattgctgaagcaatgagcaaagtgggcaggaaaggtgtggtgacccttgaggagggtaaaagtgccgagaacaacctctacgtcgtagaaggaatgcaatttgaccgtggttatatctctccttactttgtgacagacagcgagaaaatgtccgtcgagttcgacaattgcaagttacttctcgttgacaagaaaattaccaatgcaagggatcttgttggtgttttggaggatgcaattagaggcggatacccaatattaattattgctgaagacattgaacaagaagctttagcgactcttgttgtaaacaagcttagaggtacactgaagatagcagctctcagagctccagggtttggagagcgcaagagccaataccttgatgatattgccattctaactggagcaactgtgatccgtgaggaagttggtctttcacttgacaaagctggaaaagaggttcttggtaatgcttcaaaggttgtcctcacaaaggagacctcgaccatagtgggtgatggaagcacacaggatgcagtgaaaaagcgtgttacacagattaaaaatcttattgagcaagcggagcaagattacgagaaggagaaactcaatgagagaattgcaaagctctctggtggagttgctgtgattcaggttggagcacaaactgagacagaactcaaagagaagaagttgagagttgaagatgctcttaatgcaacaaaggccgctgtcgaggaaggtattgttgttggtggtggttgcactctgcttcgtcttgcttccaaggttgatgccattaaagccacgcttgataatgatgaagaaaaggttggagcggatatagttaaaagagcactaagttaccccctaaaactaatcgccaagaatgctggtgttaatggaagtgtagttagcgagaaggtgctttccaacgataacgtgaaattcggttacaatgctgcaaccggcaagtacgaggatttgatggctgcaggaatcatcgatccaacaaaggttgtgagatgttgcttggaacacgcagcttcggttgcaaagactttcttgatgtcggactgcgttgttgttgagatcaaggaacctgaaccagttcccgtcggcaacccaatggacaactcaggatatggatactaagaggagataggctaatattgaaacggattactttagcttgcgagtgtaatgattttgaacaagagaatgtgtaatgtgaaactgaaattttgaattaatcatcatatgaataaatcatgattccctcaatgcttcgaaatatctcgaaatcgcc

SEQ ID NO: 114 - DNA, 2093 bp, Arabidopsis thaliana
  source 1..2093: mol_type = genomic DNA
ttaaaagcaccttccaagcgagagtaaggagataaacctacttcctttccttgcttcagctccccttttcttatccggaaaccaaaaacttccggtgataaaacctccttcgtcatctctctacttcttggataaaatggcgtcaactttcactgccacatcttctattggttcaatggttgctccgaatggtcacaaatctgataagaaacttatcagcaagttgtcttcaagctcatttggaaggagacaaagtgtgtgtcctagacccagaagatccagttctgcaattgtgtgcgcagcaaaggaattacatttcaacaaagatgggactaccattaggagacttcaagctggtgtcaacaagctcgcagatcttgttggtgttacacttggacccaaaggacgaaatgttgttcttgagagcaagtatggatcaccacgaattgttaatgatggtgtgactgttgcaagagaggttgagttggaagacccggttgagaacattggcgctaagcttgtgaggcaagcggctgccaaaaccaatgacttggctggtgacggtacaacaacatctgttgttcttgcacaaggttttatcgctgagggtgtcaaggtggtagctgctggtgcaaaccctgttttgatcaccagaggtattgagaagacagcaaaggctttggttaccgagctcaagaaaatgtctaaggaggttgaagacagtgaacttgcagatgttgcagctgttagtgcgggtaacaacgacgaaattggaaatatgattgctgaagcaatgagcaaagtgggcaggaaaggtgtggtgacccttgaggagggtaaaagtgccgagaacaacctctacgtcgtagaaggaatgcaatttgaccgtggttatatctctccttactttgtgacagacagcgagaaaatgtccgtcgagttcgacaattgcaagttacttctcgttgacaagaaaattaccaatgcaagggatcttgttggtgttttggaggatgcaattagaggcggatacccaatattaattattgctgaagacattgaacaagaagctttagcgactcttgttgtaaacaagcttagaggtacactgaagatagcagctctcagagctccagggtttggagagcgcaagagccaataccttgatgatattgccattctaactggagcaactgtgatccgtgaggaagttggtctttcacttgacaaagctggaaaagaggttcttggtaatgcttcaaaggttgtcctcacaaaggagacctcgaccatagtgggtgatggaagcacacaggatgcagtgaaaaagcgtgttacacagattaaaaatcttattgagcaagcggagcaagattacgagaaggagaaactcaatgagagaattgcaaagctctctggtggagttgctgtgattcaggttggagcacaaactgagacagaactcaaagagaagaagttgagagttgaagatgctcttaatgcaacaaaggccgctgtcgaggaaggtattgttgttggtggtggttgcactctgcttcgtcttgcttccaaggttgatgccattaaagccacgcttgataatgatgaagaaaaggttggagcggatatagttaaaagagcactaagttaccccctaaaactaatcgccaagaatgctggtgttaatggaagtgtagttagcgagaaggtgctttccaacgataacgtgaaattcggttacaatgctgcaaccggcaagtacgaggatttgatggctgcaggaatcatcgatccaacaaaggttgtgagatgttgcttggaacacgcagcttcggttgcaaagactttcttgatgtcggactgcgttgttgttgagatcaaggaacctgaaccagttcccgtcggcaacccaatggacaactcaggatatggatactaagaggagataggctaatattgaaacggattactttagcttgcgagtgtaatgattttgaacaagagaatgtgtaatgtgaaactgaaattttgaattaatcatcatatgaataaatcatgattccctcaatgcttcgaaatatctcgaaatcgcc

SEQ ID NO: 115 - DNA, 1960 bp, Arabidopsis thaliana
  source 1..1960: mol_type = genomic DNA
gtgaacgaagataaatttcgctattcctctctctctctctctctctctctctctctctctctctcttcttcttcttctccgttcgtgctctggactcgctcgaaatcgatccgatgataatttatgcagctcgaaacttaatttagaatcatacctttttctggatttggctgacgaatccgttttcaattgcacgagttgcttcgccaggtttatcaacttaagaatgtctaattatcaaggggatgatgctgagtacatggaagatgtggatgatgaaatggatgaggatgatttagatgaggattttcgtggggatgatatggctgcctctgattccgatgtcgatgagtttgactactctaataataaaatagctgacacttcagctgaccaagcccggaaagggaaagacatccaggggattccttgggacaggcttagtattacgagagagacatacagacaaactagactagaacagtataaaaattatgaaaatgtccctaactctggggaatcttcagggaaagattgcatggccacacagaaaggggctcttttttatgatttctggcggaatacaagatctatcaaatcaagtattcttcatttccagttgaggaatttggtttgggcaacttctaagcacgatgtctaccttatgtcacaatatttggtgagccactattctactttgacatccggaaagcatgatgttctcaatgttcaaggtcatgtttccccatctgagaaacatcctggaagtttgttggagggatttacaaagactcaagtgagtacactcgcagtgagagataaatttttagttgccggtggatttcaaggagaacttatatgcaagcatcttgatagacctggtgtgagcttttgttcacgtactacttatgatgataatgctataaccaatgctattgagatttataacaaacccagtggggcacttcattttactgcgtcgaataatgattgtggagtcagagattttgatatggagagataccagcttgttaaccagtttcgctttccatggccggtgaatcacacatctttaagtcctgatggtaaattgttgacgattgtgggagacaaccctgaaagccttctggtagaccccaacactggaaagacactggcaacgctatcaggacatctggacttttcctttgcatcagcatggcacccagatggattcacgttctccacaggtaaccaggacaagacctgccgggtttgggacattcgtaacctgtcaaaatctgttgctgtcttgaggggtaaccttggagcaatccgatccattcgctacacatctgatgggaagtacatggccatggctgagccggctgactttgtccatgtgtatgatgtctcaaacgggtatgaaacggagcaagagatcgacttctttggggagatctcgggaatatcatttagccccgacacagaagcactcttcataggcgtttgggaccgcacttacggaagtctaattgagtatagccggcgccacaactactcctaccttgattcatttctatgatcacccgacataccagaggaataaaagagccgatacatatgtgctgctgcactctcctgtcgctctgttaaactaagaaacccgagaaaagagaaaacataaactcaagtcgatctctaatggtgtaaatgatgtgttgtgcaagtactagtaggaatgttgtcacagagagcggatttagttagttaatgttcatttcttgtatgagtgttggagttcgtgtattgtacataagtatatgaggttcgggtgagtttgcatcaagtctcaactcttggcaaagagacaactttactcgagtctgtggctcgttatttggctatggtcacttgtagaggaactcaatttgagatgtttctgccgattgttggatcaaattatatatcatgatgtttc

SEQ ID NO: 116 - DNA, 2741 bp, Arabidopsis thaliana
  source 1..2741: mol_type = genomic DNA
aatcggcgcgtgatcgagaaagatcttctttaacctctttgcaacaaatctactcaaaaccctaacccctttttcaaattacttccatctttagatcgaatcaaatcaatgtccgtcgacgatctccctccgtcgtcggcctccgccgtaacgccactaggctcctccgtgattccgattgtgaacaagctccaagacatattcgctcagctaggaagtcaatcgacgatcgctcttccgcaagtagctgtcgtcggaagtcaaagcagtggcaaatccagcgttctagaagctctcgtcggccgtgactttcttcctcgtggcaatgatatttgcacgcgccgacctctccgtctccagcttgttcagacgaaacctagctctgatggtggatccgatgaagagtggggcgagtttcttcaccacgatcctgttagacgtatctacgatttctctgagattcgccgtgagattgaggcggagactaatagagtatcaggagagaacaaaggtgtatcagatattccgattggtttgaagatattttcacctaatgttttggatattagtcttgtggatcttcctggtatcactaaggttcctgttggtgatcagccaagtgatatcgaagcgcgtataagaacgatgatcttgacttacattaaggaacctagttgcttgatacttgctgttagccctgctaatactgatttagcaaattcagatgcattacaaatcgcaggaaatgctgatcctgatggtcatagaaccataggtgtaatcacaaagttggatattatggacagaggtactgatgctcggaatcaccttctgggaaaaacaattcctcttcgacttggatacgtgggagttgtaaatcgtagtcaagaggatattttgatgaaccgtagcatcaaggatgctcttgttgcagaggaaaagttctttcgtagtcgtccagtttacagcggtctcacagatcgtttgggtgtccctcaactggcaaagaaattaaatcaggtccttgttcaacacatcaaggcactgcttcctagtttaaagtcacgtatcaacaatgcattgtttgctacagcaaaggagtatgagagctatggggatataacagagtctaggggtggtcaaggagctcttctcctcagttttattacaaaatactgcgaagcatactcctctaccctggaagggaaaagtaaagaaatgtcaacatctgagctctcgggtggagcaagaattctctacattttccaatcagtatttgttaagagcttagaggaggttgatccatgtgaagacttaacagctgatgatattcggactgcaatacaaaatgcaactggtcccagatctgcattatttgttccagatgttccatttgaagttcttgtcaggaggcaaatatctcgtttattagatcccagccttcagtgcgctaggttcatcttcgatgagctagtaaagattagtcatcagtgtatgatgaaagagttacagcggtttccagtcctgcaaaagcgcatggatgaggttattgggaactttctgcgagaaggtcttgaaccttcgcaggcaatgatccgagatcttattgaaatggagatggattatataaacacctcacacccaaattttatcgggggaactaaagccgtggagcaagcaatgcaaacagtcaaatcttctaggattccgcatcctgttgcgcggccaagggatactgtggagcctgagaggacggcttcttccgggagtcaaataaaaacccgatcttttctcggccgacaagctaatggaatcatcactgatcaggcagttccaactgcagcagatgctgaaagacctgcaccagctggaagcacaagctggagtggtttctcatcaatttttcgggggagtgatggtcaggcagctgctaaaaacaacctattaaacaaaccattcagcgaaactactcaagaagtgtatcagaacttgtcaacaatctatttaaaggagcctccaactattttgaagtcatctgaaactcattcagaacaggagtcagttgagattgagataacaaagctattattgaaatcctactatgacattgtaaggaagaatgtcgaggacttggtcccaaaagcaatcatgcattttctggtaaattacacgaaacgtgagctgcacaatgttttcatcgagaagctttacagggagaacttaattgaagaactgttgaaagagcccgatgagttagcgataaagaggaaacgcacgcaagagactcttcgcattcttcagcaggctaatcggacgttagacgagctgccgttagaagctgaatcggtcgagagaggttacaaaattggttcagaagcgaaacatgaggagttaccgggcacaagaagatcaaggacagaaactaatgggaacggacggcttcatatgtaaattcaaattgtgattgcacgcatgactcattcatttggtgatggaaaagatttgttttcttccctttaaatcggttgtgcgtggggaaagaaaggtgttcttaggtatagtgaaacgtgatgataaacagaggttttgttgtgagggtattatcaacctactggaaaatgtgacttaatatttgtttctcaaaaccgagaagaataatcaattcctaattttacttttcatagctttatttgttacgaaaaacaagaacgtacatgagacaatgtaatgataaatttatc

SEQ ID NO: 117 - DNA, 2749 bp, Arabidopsis thaliana
  source 1..2749: mol_type = genomic DNA
gagaaagatcttctttaacctctttgcaacaaatctactcaaaaccctaacccctttttcaaattacttccatctttagatcgaatcaaatcaatgtccgtcgacgatctccctccgtcgtcggcctccgccgtaacgccactaggctcctccgtgattccgattgtgaacaagctccaagacatattcgctcagctaggaagtcaatcgacgatcgctcttccgcaagtagctgtcgtcggaagtcaaagcagtggcaaatccagcgttctagaagctctcgtcggccgtgactttcttcctcgtggcaatgatatttgcacgcgccgacctctccgtctccagcttgttcagacgaaacctagctctgatggtggatccgatgaagagtggggcgagtttcttcaccacgatcctgttagacgtatctacgatttctctgagattcgccgtgagattgaggcggagactaatagagtatcaggagagaacaaaggtgtatcagatattccgattggtttgaagatattttcacctaatgttttggatattagtcttgtggatcttcctggtatcactaaggttcctgttggtgatcagccaagtgatatcgaagcgcgtataagaacgatgatcttgacttacattaaggaacctagttgcttgatacttgctgttagccctgctaatactgatttagcaaattcagatgcattacaaatcgcaggaaatgctgatcctgatggtcatagaaccataggtgtaatcacaaagttggatattatggacagaggtactgatgctcggaatcaccttctgggaaaaacaattcctcttcgacttggatacgtgggagttgtaaatcgtagtcaagaggatattttgatgaaccgtagcatcaaggatgctcttgttgcagaggaaaagttctttcgtagtcgtccagtttacagcggtctcacagatcgtttgggtgtccctcaactggcaaagaaattaaatcaggtccttgttcaacacatcaaggcactgcttcctagtttaaagtcacgtatcaacaatgcattgtttgctacagcaaaggagtatgagagctatggggatataacagagtctaggggtggtcaaggagctcttctcctcagttttattacaaaatactgcgaagcatactcctctaccctggaagggaaaagtaaagaaatgtcaacatctgagctctcgggtggagcaagaattctctacattttccaatcagtatttgttaagagcttagaggaggttgatccatgtgaagacttaacagctgatgatattcggactgcaatacaaaatgcaactggtcccagatctgcattatttgttccagatgttccatttgaagttcttgtcaggaggcaaatatctcgtttattagatcccagccttcagtgcgctaggttcatcttcgatgagctagtaaagattagtcatcagtgtatgatgaaagagttacagcggtttccagtcctgcaaaagcgcatggatgaggttattgggaactttctgcgagaaggtcttgaaccttcgcaggcaatgatccgagatcttattgaaatggagatggattatataaacacctcacacccaaattttatcgggggaactaaagccgtggagcaagcaatgcaaacagtcaaatcttctaggattccgcatcctgttgcgcggccaagggatactgtggagcctgagaggacggcttcttccgggagtcaaataaaaacccgatcttttctcggccgacaagctaatggaatcatcactgatcaggcatttccaactgcagcagatgctgaaagacctgcaccagctggaagcacaagctggagtggtttctcatcaatttttcgggggagtgatggtcaggcagctgctaaaaacaacctattaaacaaaccattcagcgaaactactcaagaagtgtatcagaacttgtcaacaatctatttaaaggagcctccaactattttgaagtcatctgaaactcattcagaacaggagtcagttgagattgagataacaaagctattattgaaatcctactatgacattgtaaggaagaatgtcgaggacttggtcccaaaagcaatcatgcattttctggtaaattacacgaaacgtgagctgcacaatgttttcatcgagaagctttacagggagaacttaattgaagaactgttgaaagagcccgatgagttagcgataaagaggaaacgcacgcaagagactcttcgcattcttcagcaggctaatcggacgttagacgagctgccgttagaagctgaatcggtcgagagaggttacaaaattggttcagaagcgaaacatgaggagttaccgggcacaagaagatcaaggacagaaactaatgggaacggacggcttcatatgtaaattcaaattgtgattgcacgcatgactcattcatttggtgatggaaaagatttgttttcttccctttaaatcggttgtgcgtggggaaagaaaggtgttcttaggtatagtgaaacgtgatgataaacagaggttttgttgtgagggtattatcaacctactggaaaatgtgacttaatatttgtttctcaaaaccgagaagaataatcaattcctaattttacttttcatagctttatttgttacgaaaaacaagaacgtacatgagacaatgtaatgataaatttatcactggtaagttgatcttgttctt

SEQ ID NO: 118 - DNA, 2836 bp, Arabidopsis thaliana
  source 1..2836: mol_type = genomic DNA
gagaaagatcttctttaacctctttgcaacaaatctactcaaaaccctaacccctttttcaaattacttccatctttagatcgaatcaaatcaatgtccgtcgacgatctccctccgtcgtcggcctccgccgtaacgccactaggctcctccgtgattccgattgtgaacaagctccaagacatattcgctcagctaggaagtcaatcgacgatcgctcttccgcaagtagctgtcgtcggaagtcaaagcagtggcaaatccagcgttctagaagctctcgtcggccgtgactttcttcctcgtggcaatgatatttgcacgcgccgacctctccgtctccagcttgttcagacgaaacctagctctgatggtggatccgatgaagagtggggcgagtttcttcaccacgatcctgttagacgtatctacgatttctctgagattcgccgtgagattgaggcggagactaatagagtatcaggagagaacaaaggtgtatcagatattccgattggtttgaagatattttcacctaatgttttggatattagtcttgtggatcttcctggtatcactaaggttcctgttggtgatcagccaagtgatatcgaagcgcgtataagaacgatgatcttgacttacattaaggaacctagttgcttgatacttgctgttagccctgctaatactgatttagcaaattcagatgcattacaaatcgcaggaaatgctgatcctgatggtcatagaaccataggtgtaatcacaaagttggatattatggacagaggtactgatgctcggaatcaccttctgggaaaaacaattcctcttcgacttggatacgtgggagttgtaaatcgtagtcaagaggatattttgatgaaccgtagcatcaaggatgctcttgttgcagaggaaaagttctttcgtagtcgtccagtttacagcggtctcacagatcgtttgggtgtccctcaactggcaaagaaattaaatcaggtccttgttcaacacatcaaggcactgcttcctagtttaaagtcacgtatcaacaatgcattgtttgctacagcaaaggagtatgagagctatggggatataacagagtctaggggtggtcaaggagctcttctcctcagttttattacaaaatactgcgaagcatactcctctaccctggaagggaaaagtaaagaaatgtcaacatctgagctctcgggtggagcaagaattctctacattttccaatcagtatttgttaagagcttagaggtaatcactgtgtgtagatatctttgtttagttagtggggctatttgcacggaaggcagacagttcgtttcaggttttcagttcttggaagttgatccatgtgaagacttaacagctgatgatattcggactgcaatacaaaatgcaactggtcccagatctgcattatttgttccagatgttccatttgaagttcttgtcaggaggcaaatatctcgtttattagatcccagccttcagtgcgctaggttcatcttcgatgagctagtaaagattagtcatcagtgtatgatgaaagagttacagcggtttccagtcctgcaaaagcgcatggatgaggttattgggaactttctgcgagaaggtcttgaaccttcgcaggcaatgatccgagatcttattgaaatggagatggattatataaacacctcacacccaaattttatcgggggaactaaagccgtggagcaagcaatgcaaacagtcaaatcttctaggattccgcatcctgttgcgcggccaagggatactgtggagcctgagaggacggcttcttccgggagtcaaataaaaacccgatcttttctcggccgacaagctaatggaatcatcactgatcaggcagttccaactgcagcagatgctgaaagacctgcaccagctggaagcacaagctggagtggtttctcatcaatttttcgggggagtgatggtcaggcagctgctaaaaacaacctattaaacaaaccattcagcgaaactactcaagaagtgtatcagaacttgtcaacaatctatttaaaggagcctccaactattttgaagtcatctgaaactcattcagaacaggagtcagttgagattgagataacaaagctattattgaaatcctactatgacattgtaaggaagaatgtcgaggacttggtcccaaaagcaatcatgcattttctggtaaattacacgaaacgtgagctgcacaatgttttcatcgagaagctttacagggagaacttaattgaagaactgttgaaagagcccgatgagttagcgataaagaggaaacgcacgcaagagactcttcgcattcttcagcaggctaatcggacgttagacgagctgccgttagaagctgaatcggtcgagagaggttacaaaattggttcagaagcgaaacatgaggagttaccgggcacaagaagatcaaggacagaaactaatgggaacggacggcttcatatgtaaattcaaattgtgattgcacgcatgactcattcatttggtgatggaaaagatttgttttcttccctttaaatcggttgtgcgtggggaaagaaaggtgttcttaggtatagtgaaacgtgatgataaacagaggttttgttgtgagggtattatcaacctactggaaaatgtgacttaatatttgtttctcaaaaccgagaagaataatcaattcctaattttacttttcatagctttatttgttacgaaaaacaagaacgtacatgagacaatgtaatgataaatttatcactggtaagttgatcttgttctt

SEQ ID NO: 119 - DNA, 3430 bp, Arabidopsis thaliana
  source 1..3430: mol_type = genomic DNA
aaactaaaataaataaggaaaacactcttcttcaaatccagtagagagattcaagacgagtctcatcgaaagttcgaatctttcgtcatctgattagctttctcttagggtttatttcgatttcgatttagtgttctccatcaatggcgacacccatggttagttccgctggaggattactagcaatgctcaacgagcctcatcctgttttgaagcttcatgcgctctctaacctcaacaatttggttgaccaattctggcctgagatctccactagtgtccccatcattgagagtttatatgaagatgaagaattcgatctgcatcaaagacagcttgctgctttgctggtctctaaggttttctattacttgggcgagcttaatgattcgctgtcttatgccctaggagccggtcccttatttgatgtttcagaggattctgattatgttcatacgcttctggccaaagcaatagacgaatatgccagtctcagatcaaaggcagttgagtcaaatgagatggtggacattgatcccaggctagaggcgattgttgaaagaatgcttggaaaatgcatcagtgatgggaagtatcaacaagccatgggcattgcgatagaatgccggagattggataagttggaagaagctatcattaagagcgataatgttcagggaactttatcatattgcatcaatgtttctcattcctttgtcaaccgcagagagtacagacatgaggtgcttagtttacttgtaaaagtctaccagaagctgccctctcctgattatttgagcatttgtcaatgcctcatgtttttggatgaaccgcaaggtgttgcaagcatattggagaagcttcttcgctcagagaacaaggatgatgctttattggcattgcaaattgcatttgatcttgtagagaacgagcaccaggcctttctcttgagtgttagagatcgccttccagctcccaaaacacgtgctgtagaagcaactcaggctgttgaaacaactattgctcctaatgagaacccttcgggagatgttcagatggcagatgaaactccagctcagacaattgtgcatgagacggatccagttgatgctacatatgctgagaggttaacaaagattaagggaattttatctggagagacatctattcagctgacactgcagtttctttacagccacaacaaatcggacctgctgatactgaagacaatcaaacagtctgtagagatgcggaacagtgtatgccacagtgctacaatatatgctaatgccattatgcatgctggaactacagtggacactttccttagagagaatttggattggctaagcagggcaaccaattgggctaagttcagtgctaccgcgggattaggtgttattcacagaggtcacctgcaacagggtaggtcattgatggctccatacttgcctcagggaggagcaggtggtggtgggagtccttattccgaaggaggtgctttatatgctcttggccttattcatgctaaccatggcgagggaatcaagcaatttctacgtgatagcctacgcagcactaatgttgaggtcattcaacatggagcttgtttaggtcttggcttgtcagctctcgggacagctgatgaagagatatatgatgatgtcaaaagcgtgctttatactgacagtgcagttgctggtgaagctgctggcatcagcatgggtttattattggttggaactgctactgaaaaggcaagtgagatgctcgcttatgctcatgagacacaacatgagaagataataaggggattggctctaggaatagctcttacagtatatggtagagaagaaggagcagataccttgattgagcagatgacgagagatcaggatccaatcattcgttatggtggcatgtacgcattggcattggcttacagtggaaccgcaaacaacaaggcaattcgacaattgctgcactttgctgtatctgatgtcagtgatgatgttaggaggactgccgttctggcacttggatttgtcttgtactctgatccagagcagactccccgtattgtatcactgctttctgagtcatacaatccacatgttcgctatggtgcggctcttgcagtgggtatttcttgtgcaggcactggcctcagcgaagcgatatccttgttggagccacttacatcagatgttgttgactttgttcgtcaaggtgctttgattgcaatggccatggtgatggttcaaattagcgaagctagcgattctcgtgttggagtatttaggcgccaacttgagaagattatacttgacaagcacgaagatacaatgagcaagatgggagcgattctggcctctggtatccttgatgctggtggtaggaacgttactataagactgctctctaagaccaaacatgacaaagtcactgctgttatcggccttgcagtcttcagccagttttggtattggtacccactgatctatttcattagtttggccttctcaccaaccgctttcatcggtttgaactatgaccttaaggtcccaaagtttgagttcatgtcacatgcaaaaccgtctttatttgagtacccaaaacccaccacggttcctacagccaataccgccgttaaacttccaaccgctgttctctcaacttcagttaaagccaaagctagggctaagaaagaagcagagcaaaaagctattgctgagaaaacatctggccctgaaaagcctgtcaatgaaagtggatctggaaaaggaaaagcatcaactgagaaggaaggagactctatgcaggtcgatagcccagcagcggtcgagaagaaagcacctgagcctgagccagcgtttgagattttagtgaacccagctcgagtagtcccagctcaagagaaatacataaagttacttgatgacagcagatatgtaccagtgaagctagcaccgtcaggtttcgttcttctcaaagacttgcgtgaacacgagccagaggttctctctctgaccgacgcaccaacttcaacagcttctcctgcaactggtacagcagcggctgcacaaggaaccccggcctcagctatggccgtagatgatgagccacaacctccacaagcctttgaatacgcttcatgattttatttcatttaaaattagtgggaatttgttgttggttttattggtttctgttgaaagacaaaaggcagagagaaaaacagatctttgaactttgagataactgcttcttgtcatttgcaactggtttcatgttcaactacgatcttgtattaggtacttctctttttaagtattatctaaataattaagtgtcgttttatgtcttttagtggtactggtatatctgatttcttctacaacaagatagtaataaactacattttctaagt

SEQ ID NO: 120 - DNA, 1570 bp, Arabidopsis thaliana
  source 1..1570: mol_type = genomic DNA
cctcttcctcttcaagccacaaagactcataaaaatccaacctttttctcatttcctctgttaaatttttcctgaaaagtttattcctttttctacagatcgaatttcgtagttctcacctcactgaatctgttactttctctataatctaaatcttcaaaaatgtttctggttttgtgaaatcaacacttaaaaactcgagcttttacctcctctgttttttcaaagataaaaatgagagaagacgattcagactggttcgcaagatgggaagaagaacttccatcaccagaagagctcatgccaatatcacaatctctaatctcacccgatctagctctagccttcgatatacgaaccccaaatcacggaaacggaaactcaaaccaacctcatcatcatcatcatcaccaaaccacacctcctacaccgtctcagcttcagcttccatcttctcaagccaattcctcagccgaattcgctgcagattcagcagatctaggctccggaggagctgccggagacgaaccagctcggactttaaaacgacctcgtcttgtctggacaccgcagctgcataaacgtttcgttgatgctgttgcgcatttagggattaagaacgcagttcctaaaacgattatgcagcttatgagtgttgatggtttaactagagaaaacgttgcgagtcatttgcaaaagtatagactttatcttaagagaatgcaaggtttgtcttctggtggtggtgctggttcagatccagctactgatcgtcttttcgctagctctcctgttcctgctcactttcttcatcctaatcgtgttcccagttctgatcatttcatgccgtcttttgttcctattgctactcttcaacaacaacaacaaatggctgctgctgcggccgctgctgcagcagctaatcctcatttacaaccgcctcagttccaccgtcaaatcgcagctgcgcattttggttcaccgactaatggtggattcagttcaccgacgagtaatggacagtttggatcaccgactagtaatggatttggatcaccgacgactaatgggaagtttgatccttcgttcttggcggtgaggcaaacgcagcagcaaccaattcagagaatgtctacaccatcattgcatagtccagttagtaattacgttgaggatttggaatctgcaaacgctaatggagggagaactgtcttaactttattcccaactcgagacgattaaaaagtcattatctttccggttactagatgttcaaaatgtctctgcagtcatcaagaacatgagtcagctgatcgttcttgtgcatcggttttatccggtggcgtttactctgtgcagtcttatcagtttaacattgatacaatccagcgtcaatgtgtggtcaagttctgtatctgaagctcaagcaccttcaggtcaaggcttgtattaacccttgtagctttcttgtgtaagattaatgtaaagatgagtttacttttgaacgtacatccgtacgaacaaactcaagattggaaaaaagaatgaaaaaaacaaaaacttacttcac

SEQ ID NO: 121 - DNA, 3856 bp, Arabidopsis thaliana
  source 1..3856: mol_type = genomic DNA
cgccggggactttgatatcatctgcgccgaacaaaaactctgcagaaaccctaattttcgtcagtgattgattcttccgtttccaccatggaagaagtatgcgaaggaaaagaattctcattccctcgtcaagaagaagatgtcctctccttctggactgaaatcgatgctttcaagacacagctcaaacgcactgagaatcttcctgagtacatcttctacgacggacctccttttgccaccggacttcctcactacggacatatcctcgctggtacgattaaagatattgtgactcggtatcagaccatgactggtcaccatgtcactcgtcggtttgggtgggattgtcatggcttacctgttgagaatgagattgatcggaaattgaatattaagaggagagatgaagttattaagatgggaattgataagtataatgaagagtgtaggagtattgtgactcgttatgttgctgagtgggagaaggttattactaggtgtggtcgttggattgattttaagaatgattataagactatggatttgccttttatggaaagtgtttggtgggttttttctcagctttgggagaagaatcttgtttacagaggattcaaggttatgccgtacagtactggttgtaagacacctttatctaattttgaagctggtcagaactataaggaagtccctgatcctgaaatcatggtgacttttccggttattggggatcaagataatgctgcttttgtggcatggactactactccgtggactcttccaagcaatcttgctttgtgtgtaaatgcgaagtttgtctatgtgaaggttcgtaacaagaacactggaaaagtgtacattgttgctgaatctcggttgtctgctcttcccactgataagcctaaggccaagttaagtaatggacctgctggtgatactaagaaagcaaatcctaaagctaaaggtgctaaacctgagagtgcagctgattcttatgaagttttggagaaatttaatggagcttccctggttgggaagaagtatgaacctttgtttgattactttagtgatttctcaagtgaggcctttcgagtagtagcagatgattatgtcactgatgacagtggtactggtattgtccactgtgctcctgcctttggtgaagatgattatcgtgtttgtcttttgaacaaaataatcaaaaagggggagaatctagttgttgctgttgatgatgatgggttgtttactgagagaattacccacttcagtggccgttatgtcaaagatgcagacaaggatataattgaagccgttaaggccaagggcaggcttgttaaaacgggaagctttactcactcatacccattttgctggcgatcagacaccccactcatatatagagcagttccaagttggtttgtgcgtgtggagcagttgaaagaaaagttgttaaaaagcaatgaacagacagaatgggtacctggttatgtgaaggataaacgttttcacaattggctcgaaaatgcaagggattgggcaatcagccgaagtagattttggggcacgcctcttccgatatggataagtgatgatggggaggaagttgtgatcatggattccgtagagaagcttgaaaagctctctggtgttaaggtctttgacctgcatcgtcaccatattgatcatattacaattccatctagtcgtggcgatgagtttggtgtgctccgtcgtgtagaagatgtttttgattgttggtttgagagtgggtcaatgccttacgcgtatatccattatccgtttgaaaacaaggagttatttgagaagaactttcctggtgattttgtggctgaaggtcttgatcagactcgtggatggttttatactcttatggtgttgtctactgcattatttgaaaaaccagcgtttaaaaatctgatttgcaatggtcttgtacttgctgaggatgggaaaaagatggctaagaaattacggaattatccaccacctttggaagtcatagatgagtatggggctgatgctgtgcgattgtacctgataaattctccggttgtacgtgctgagccactacgcttcaaaaaagaaggagtactcggtgttgtcaaagatgtattccttccatggtacaatgcatatcggttcctcgttcagaatgcaaagagacttgagactgaaggtggtgtgccctttgttcctactgatctggcaactatacagtcagcaaacattcttgatcagtggattcactcagctacgcagagtcttgttcgttttgtccgcgaggagatggatgcctatcggctttacactgtggttcctcgtctcttgaagttcctcgacaatctcactaacatatatgtcagattcaaccgcaagagattaaaaggccgtacgggggaagatgattgtcacactgctctttcgactctattcaatgtgctccttacttcttgcaaagtgatggccccgtttacacctttcttcactgaaactttgtaccagaatctgcggaaagcgtgtaaaggttctgaggaaagtgttcactactgcagtattccaccaagggaaggaatggaaggggagaggattgagttaagtgttacgaggatgatgaaaatcattgatcttgctcggaacattcgtgagcgtaacaaactacccttgaaaactcctctaaaggaaatgattgtagtccatcccgatgctgatttcttaaatgacataactggagtactaagagagtatgtcttggaagaacttaacgtgagatcgcttgtaccatgcaatgatactctgaagtatgcatcactaaaagcagaaccagatttcagtgtattgggaaagcgacttggaaagtcgatggggcttgttgcaaaggaagttaaagaaatgtctcaaaaagatatcttagcatttgaggaggctggggaagttactattgctaaccacttgctaaaggaaacagatatcaagattgttagggttttcaaacgcccagacgatttgaaagagaatgagattgattcagctggagatggtgatgttttggtgattctggatctacgagcagatgattctttggttgaagcaggttttgcccgtgagattgtaaacaggatccagaaactaaggaaaaagtcaggtctggaaccaacagactttgtggaagtgtacttccaatcattggacgaggatgaatctgtttctaaacaagttctagtctctcaggaacaaaacatcaaggattcaattggctccactttacttttgtctagtttaatgccatcacatgcagtcataatagccgatgagacattcaccccaaaagaaacatccgatgagagtgtcaaaaaggttccaaagttgtcgtataagataagtttggctagaccggctttgaagttcaatgaagaggctgttcttgctttatactcaggagatgtgaaatctgcaaccgggcttcaaacatacttgttatcaagggatcattcgaatttgaagtcagagttccaagccggagatgggaagataactgtaagctgcattgaaaatgtgcctgttgcgactgtggttcttggcgaacatctccatttgagtgtcggcgatgacttattgagcaagaggaacgcatgagccgtccctccggttttgtttgatttattgtggtaacttgggatttatttcccttatttttcttcttccatatcttacctataaactacttatttagattgttgcaaaaagttaaatctcagtgttgagactctcttttactcgttctatttgtacaatactaaacttttattcatctcaaaatttatggttggac

SEQ ID NO: 122 - DNA, 2933 bp, Arabidopsis thaliana
  source 1..2933: mol_type = genomic DNA
atcttctttctatagtttccatgaagtcttcttcttctcagagctacgatgttttccccaacttcagaggggaagatgtccgccactcattagtcagccaccttcgtaaggaacttgatcgcaaattcatcaatacattcaacgacaacaggatcgaaagaagccgcaaaataaccccagagctgttattggctatagaaaactcaaggatctcacttgtcgtcttctctaaaaactatgcttcttccacgtggtgcttagatgaattggtgaagatccaagagtgctatgagaaattggatcaaatggtgattcctattttctacaaagtagatccttctcatgttagaaaacagaccggagagtttggcatggtctttggggagacctgcaagggcagaacagagaatgagaagcgaaaatggatgcgagctctagcagaggtagcacatctagccggagaagatcttcggaactgataagtttcaggtgggtaaacttccgataagtgattgtcggaacagtgtgtatgaggattaaacacagagaaagatcgtgtggtgattgtagtgtcggtaaacaagtttttaaagcctcccagctgtaatgtatcaaccgtcggaaaggggtgggtcccacgagcctgagtaaagacgcgtagcgaagcagaaatgcttgaaaatatcgccaaggatgtttcaaacaaactcttccccccatcaaataatttcagtgacttcgtcgggattgaagctcatatagaggcattgatatcaatgttgcgcttcgactccaagaaagcgcgaatgatagggatttgtgggccttctgaaactggtaagactactataggaagagctttatacagcagactcaaaagcgacttccaccatcgggctttcgtagcatataagagaaaaatacggagcgactatgaccagaagctgtattgggaagaacaatttctatcagaaattctttgtcagaaggatataaagatagaggaatgtggtgcggtggaacaacgactaaagcacacgaaagttcttattgttcttgatgatgttgatgatatagagctactaaaaacgttggtaggacgtatcagatggtttggatctgagagcaaaattgttgtgattactcaaaaaagggaacttctcaaggctcacaacattgcacatgtttatgaagtgggattcccatcagaagaactggctcatcaaatgttttgtcgatatgcttttgggaaaaactctccacctcatggtttcaacgagcttgcagatgaagctgcaaagattgccggtaatcgtcctaaagctctcaagtacgttggttcgtcttttagaagactagacaaggaacaatgggtgaagatgctatcggagttccgtagtaatgggaataaactaaaaatcagctatgatgagttagatggtaaaggtcaagattacgttgcgtgtttaaccaatggttcaaattcccaggtgaaggcagagtggatccacttggcactaggcgtgtctatattacttaacatccgcagtgacggaacgacaattctcaaacatttgagctacaatcgaagcatggcgcaacaagcaaaaatatggtggtatgaaaatttggaaagagtgtgcaagaagtacaatatatgtggcatagatagctcaactgatggtggtggttcaacgtatggacaatgttcaaattcccaatttcaaagaaacatggacgcaagccccgggggaaacaaaaccagtaatcaatccacaaaagattcaccgagagcttctcaagtagagaaggaaaagatcgagtactgtgagccacatgtatatataacacctgccatcttcagtgacggaaccagagctcccaaatacgtggagtctagtagccgaagagtaacccaagtgcaccacgccaaaacatggtggccggagaattgtgaaaaagtgtacgagaaccacaacaacatatatggcatagatagatcaattgacggtggtgataagtttgagggaaaaagtaaagttagtgacggtgggttagacggcaaagatcaaggttcaatgtatggacaaagttcaaattccgagcttcaaataaacatggacgcagacaataggagatgtgaacctgtgagtgagatgcttttcaaaaattacaatgtgtgttcgcctaatgcacatatgcctgcaggtttaaccgatgtaaactgttcaaatccccagtctcaaagaaaattggacgcaagcctaaagaaagacaaaattgtgcatgagtggattcgaaccggtagtggcttcttttttgattttcagggcccaaaatctatagtgagtgctgctcaagtggacgagaaaaatttcgagtactgtgaacaaggtgtgtatataacacttggcatcctcagtggcggaattatagttctcaaacatttggagttcagccgaagaatggcgcaacaagcaaaagtttggtggtcggaaaattggataaaagtgtaccaggagcacaacatatgtggcatagataaatcatttgatggtaggtttgatgatagacgtgtcattcgtcaattaagaccaaactgaagcacggcctggcccttgtaaaagtcaggacttgagctagatacttaagccaagcagatctgtttggctaagtctggtcgggttagcgcgaaattgtcgaaatctgtttaataattgcattcagtgcaagtctttaatttgtacttcatggctttaatacactaattaaacattggatcatttttagttttttcttcttttcaaaatacatatttttctaagttttccaatttagtgattttattagttctttagtagaatactggatcatggacacatgctacaacatgctttgacctaattatgaaatttatcagcgaatatattatg

SEQ ID NO: 123 - DNA, 960 bp, Arabidopsis thaliana
  source 1..960: mol_type = genomic DNA
tcgtcgccgttaaaatctgcgatctcattgctcattggtgaagacaaatccctaattcgtatgtcagattctgtggccggcgatttccctcccgatccacttctcgcctccggagccttcatctcctccgccggtgacggaaccctagacagtagtgcgaaacgacgaccgattcagggaggaatcggaatttctggttcgggagagagcgtacgcatcgggatggctaacggcactgatcaggtgaatcatcagacggaatcgaagtcgcggaagcgtgcggcgcctggagataattggttgcctcctggttggagagttgaagataagattcgaacttccggtgccacagctggttcggtggataagtactattacgaaccaaatacaggacgtaagtttcggtccaggactgaggtgctgtactacttggaacatggaacttctaaaagaggcaccaagaaagctgagaatacatatttcaatccagaccattttgaaggccaaggaagcaatagagtcaccagaaccgctacagtgcctccacctccgccaccgccattggactttgattttaagaatccaccagacaaggtaagctggtctatggcaaacgcaggagaagaaggttggatacctaatattggggacgtcaaggttcaagactcagtgagacgagattggagcactgcgtttacctttatcacaagccgaaaccctagtaaagtgtcggcttgaagactatgatgacctggtggcgatttttgggttgttgcatctatggtaagatacacagatatgttagggttacttaattggataattcttgtttagtcttcattcatcaatcatcaagttatgtgtactataatttttgtagcggtttttggaagaatatgataaggggatatgcatctttgtgtttgcttttggaacgtgataaccattcgacttttgact

SEQ ID NO: 124 - DNA, 464 bp, Cardiovirus A
  source 1..464: mol_type = other DNA
gagggcccggaaacctggccctgtcttcttgacgagcattcctaggggtctttcccctctcgccaaaggaatgcaaggtctgttgaatgtcgtgaaggaagcagttcctctggaagcttcttgaagacaaacaacgtctgtagcgaccctttgcaggcagcggaaccccccacctggcgacaggtgcctctgcggccaaaagccacgtgtataagatacacctgcaaaggcggcacaaccccagtgccacgttgtgagttggatagttgtggaaagagtcaaatggctctcctcaagcgtattcaacaaggggctgaaggatgcccagaaggtaccccattgtatgggatctgatctggggcctcggtgcacatgctttacatgtgtttagtcgaggttaaaaaaacgtctaggccccccgaaccacggggacgtggttttcctttgaaaaacacgatgataat

SEQ ID NO: 125 - DNA, 228 bp, Tobacco mosaic virus
  source 1..228: mol_type = other DNA
atctaagttaggttgtaaacatattagagacgttgttcatttggaagagttacgcgagtctttgtgtgatgtagctagtaacctaaataattgtgcgtatttttcacagttagatgaggccgttgccgaggttcataagaccgcggtaggcggttcgtttgctttttgtagtataattaaatatttgtcagataagagattgtttagagatttgttctttgtttgata

SEQ ID NO: 126 - DNA, 101 bp, Hibiscus chlorotic ringspot virus
  source 1..101: mol_type = other DNA
tagcttgtttgggttctttatcactgtcctgattaaggctgaatcagaacactttcacttccacacacacgacagtagtaagacacaaaatatagtagtta

SEQ ID NO: 127 - DNA, 147 bp, Zea mays
  source 1..147: mol_type = other DNA
agcacaacatttcaaccagaaacactagccgaagcaaatccattccacaagcacctggtgggatcatctcatcatcagaaaccaagagagagattccgtgtccgcttgttgtagtagattgtgaggactgaggaccgagaagcagcc

SEQ ID NO: 128 - DNA, 196 bp, Plautia stali intestine virus
  source 1..196: mol_type = other DNA
aagctgactatgtgatcttattaaaattaggttaaatttcgaggttaaaaatagttttaatattgctatagtcttagaggtcttgtatatttatacttaccacacaagatggaccggagcagccctccaatatctagtgtaccctcgtgctcgctcaaacattaagtggtgttgtgcgaaaagaatctcacttcaa

SEQ ID NO: 129 - DNA, 174 bp, Kashmir bee virus
  source 1..174: mol_type = other DNA
aatttaaatatgttaataatgctgaagacaagtatttcgattattaacctctatatttctatataaagtatctgtgagtctcagtggacatcacagtaaggtcgcagttaacttgtaatcttttcattcctgtgtcggagcagtggtaatggagccggacgatttcgccaaaac

SEQ ID NO: 130 - DNA, 204 bp, Solenopsis invicta virus 1
  source 1..204: mol_type = other DNA
aacgtttctcttctggttaccagcaacataggaaattgtcgttgaactacatgttgtaaggctttagagaaataagggagtgtcctatttaggatgaggtgctccggtggcagccccaccaaaacctctagcgactaggaacagctatatcgggttgctatagcagtcaggatgtcattctggcgttccgaaatacccaaacct

SEQ ID NO: 131 - DNA, 178 bp, Triatoma virus
  source 1..178: mol_type = other DNA
tgatcttgctttcgtaataaaattctgtacataaaagtcgaaagtattgctatagttaaggttgcgcttgcctatttaggcatacttctcaggatggcgcgttgcagtccaacaagatccagggactgtacagaattttcctatacctcgagtcgggtttggaatctaaggttgactc

SEQ ID NO: 132 - DNA, 211 bp, Cricket paralysis virus
  source 1..211: mol_type = other DNA
taaaaagcaaaaatgtgatcttgcttgtaaatacaattttgagaggttaataaattacaagtagtgctatttttgtatttaggttagctatttagctttacgttccaggatgcctagtggcagccccacaatatccaggaagccctctctgcggtttttcagattaggtagtcgaaaaacctaagaaatttacctgctacatttcaagata

SEQ ID NO: 133 - DNA, 353 bp, Cricket paralysis virus
  source 1..353: mol_type = other DNA
ttcgataccaagagctggtgtctgagggattacgactcgcgtggtcggacagcacatgttagtcatgtattatggtgtttcccaacacgtatctttgctctagtattgaactttagtgatgagtgtacttggcatgtacacctgattagttagcccttgtggatacgccactgccgctcaggtacagtaggacataccccaaatattgggttccactcgtagagaagaaaattagtggcgaaacgtacggtttatgtcaaaggagaaggtgattttaattgcacctgaagcaaccctaggtcttccctttgatgtgagctaataaggagtaaccgattcttacaatgtgatca

SEQ ID NO: 134 - DNA, 232 bp, Hepacivirus C
  source 1..232: mol_type = other DNA
gcctccaggaccccccctcccgggagagccatagtggtctgcggaaccggtgagtacaccggaattgccaggacgaccgggtcctttcttggataaacccgctcaatgcctggagatttgggcgtgcccccgcaagactgctagccgagtagtgttgggtcgcgaaaggccttgtggtactgcctgatagggtgcttgcgagtgccccgggaggtctcgtagaccgtgcacc

SEQ ID NO: 135 - DNA, 116 bp, Turnip crinkle virus
  source 1..116: mol_type = other DNA
ctctctctcactggtcctcctactttgtcatctgattcctgaaatcaaaccgattcacacatcctacaacacacacgactcatcgaagcagcaacacataagcatcaacactggaa

SEQ ID NO: 136 - DNA, 148 bp, Turnip vein-clearing virus
  source 1..148: mol_type = other DNA
gaattcgtcgattcggttgcagcatttaaagcggttgacaactttaaaagaaggaaaaagaaggttgaagaaaagggtgtagtaagtaagtataagtacagaccggagaagtacgccggtcctgattcgtttaatttgaaagaagaaa

SEQ ID NO: 137 - DNA, 579 bp, Rhopalosiphum padi virus
  source 1..579: mol_type = other DNA
gataaaagaacctataatcccttcgcacaccgcgtcacaccgcgctatatgctgctcattaggaattacggctccttttttgtggatacaatctcttgtatacgatatacttattgttaatttcattgacctttacgcaatcctgcgtaaatgctggtatagggtgtacttcggatttccgagcctatattggttttgaaaggacctttaagtccctactatactacattgtactagcgtaggccacgtaggcccgtaagatattataactattttattatattttattcaccccccacattaatcccagttaaagctttataactataagtaagccgtgccgaaacgttaatcggtcgctagttgcgtaacaactgttagtttaattttccaaaatttatttttcacaatttttagttaagattttagcttgccttaagcagtctttatatcttctgtatattattttaaagtttataggagcaaagttcgctttactcgcaatagctattttatttattttaggaatattatcacctcgtaattatttaattataacattagctttatctatttata

SEQ ID NO: 138 - DNA, 367 bp, Homo sapiens
  source 1..367: mol_type = other DNA
aattccagcgagaggcagagggagcgagcgggcggccggctagggtggaagagccgggcgagcagagctgcgctgcgggcgtcctgggaagggagatccggagcgaatagggggcttcgcctctggcccagccctcccgctgatcccccagccagcggtccgcaacccttgccgcatccacgaaactttgcccatagcagcgggcgggcactttgcactggaacttacaacacccgagcaaggacgcgactctcccgacgcggggaggctattctgcccatttggggacacttccccgccgctgccaggacccgcttctctgaaaggctctccttgcagctgcttagacgctggatttttttcgggt

SEQ ID NO: 139 - DNA, 222 bp, Israeli acute paralysis virus
  source 1..222: mol_type = other DNA
gtatagtgttctggaggcatcattctatggttacccatcattagaggaaatttccaataaactctggtgtaaggcttagagtgatggtcgaggtgccctatttagggtgaggagcctcggtggcagccccaccaaatcctctattggataggaacagctgtactgggcagttacagcagtcgtatggtaacacatgcggcgttccgaaataccatgcctggc

SEQ ID NO: 140 - DNA, 174 bp, Drosophila C virus
  source 1..174: mol_type = other DNA
aatgattttgaaacatattaagatgtttatacgagcgtgttgtttactattttcaggatatgtggaagcggttgtgtatgatctatacgcacatttagttcccagagggcgttgtcgtctccccctaagcaagggagaaacacgtggcacatgatcttgcgcttaacgataaaa

SEQ ID NO: 141 - DNA, 190 bp, Black queen cell virus
  source 1..190: mol_type = other DNA
ccaacaatgtgatcttgcttgcggaggcaaaatttgcacagtataaaatctgcaagtagtgctattgttggaatcaccgtacctatttaggtttacgctccaagatcggtggatagcagccctatcaatatctaggagaactgtgctatgtttagaagattaggtagtctctaaacagaacaatttacct

SEQ ID NO: 142 - DNA, 174 bp, Homalodisca coagulata virus 1
  source 1..174: mol_type = other DNA
ttgcctctctcaacaaaaagccaccgacattaagagagagagtattgctgcttagttaactgcaggccctatttagggttaccgcccaggatctgcaacagcattcctgtatcatccagggcaccggtggacttggtgaggattgagttgacctcatcattagagaccagactc

SEQ ID NO: 143 - DNA, 184 bp, Aphid lethal paralysis virus
  source 1..184: mol_type = other DNA
aattactaatttgatctttaggttataatgttaggactataaaaattagcttaatgcatttagtaatttaaggcttagttatttaactttacttatcaagatggccgttggcagccccacgaaatctagattagtccgaatgtcctattttgattaggtggtcagataggtcagaaactcacct

SEQ ID NO: 144 - DNA, 174 bp, Himetobi P virus
  source 1..174: mol_type = other DNA
catccgtaatacaacccggaataacctccaaaccgagaagaactagtctatgaccagacgaaaaggaactagtccctgttcttttcttagggcctttttcacctgggtaaagtgtagttattgcgtataactctggtatcaataccacccggaagaaattatttatctgccatc

SEQ ID NO: 145 - DNA, 174 bp, Mud crab virus
  source 1..174: mol_type = other DNA
catttatttatattaaatactgacactttgcgggttaaaatgtttaatactatttttcaatttgaggttgtatgagataattttgatttctatgttatcattgaataagggagtctggccctaattgatgtacgactcttctttggttgcgacccgagtcccttctacatcaag

SEQ ID NO: 146 - DNA, 642 bp, Cadicivirus A
  source 1..642: mol_type = other DNA
aactctaagccgaacaattatagctaggctttttattatataacattaattaggcattagcgttgtcgccaatctcttggtaatcctaaggatacctttcctgttgactaagatgaagcgccttcggttaccgatgcccggtgtccacgaagccatcgtggtcggccgcgtcccccacctctcccaacttggactccatgttttcagtaggtgtaatgattagtattattgattctgctcgttcaatgtgtttatcttcacgatctgggacccaacacatgcttcactcatgtttaaatgttggttccctcattttgaagacacccaaaccatagagtgcgagaatgaggatttctacttccattctggtaacagaaatgaattcctgcgtgtgtctcgtaaatggaatctttaagaacttcagataaatcgaacaatacactaatacaagttgttttctaccaacatgttcaatgcggctaatctgaccgtggagctgtgaagcgctcaaacccgagtgttgtatacagtcgtaatgcgtaagtccatgaggaaccgactactgttacctctgttggtgtgtttctcctttattctcttttattattatttgttattgcaaatactacaactttgatcaac

SEQ ID NO: 147 - DNA, 130 bp, Arabidopsis thaliana
  source 1..130: mol_type = genomic DNA
gtaaggatttttatgatatagtatgcttatgtattttgtactgaaagcatatcctgcttcattgggatattactgaaagcatttaactacatgtaaactcacttgatgatcaataaacttgattttgcag

SEQ ID NO: 148 - DNA, 91 bp, Arabidopsis thaliana
  source 1..91: mol_type = genomic DNA
gtaacattccttagttacctttcttttctttttccatcataagtttatagattgtacatgctttgagatttttctttgcaaacaatctcag

SEQ ID NO: 149 - DNA, 108 bp, Arabidopsis thaliana
  source 1..108: mol_type = genomic DNA
gtgctcttgaaattggaactcttcttttgttgtctaaacctatcaatttctttgcggaaatttatttgaagctgtagagttaaaattgagtcttttaaacttttgtag

SEQ ID NO: 150 - DNA, 101 bp, Arabidopsis thaliana
  source 1..101: mol_type = genomic DNA
gtaagttgttacttatgattgttttcctctctgctacatgtattttgttgttcatttctgtaagatataagaattgagttttcctctgatgatattattag

SEQ ID NO: 151 - DNA, 121 bp, Arabidopsis thaliana
  source 1..121: mol_type = genomic DNA
gttagtatcatatgaagaaatacctagtttcagttgatgaatgctattttctgacctcagttgttctcttttgagaattatttcttttctaatttgcctgatttttctattaattcattag

SEQ ID NO: 152 - protein, 124 aa, Arabidopsis thaliana
GTAAATCCTGGTCCACACTTTTACGATAAAAACACAAGATTTTAAACTATGAACTGATCAATAATCATTCCTAAAAGACCACACTTTTGTTTTGTTTCTAAAGTAATTTTTACTGTTATAACAG

SEQ ID NO: 153 - protein, 136 aa, Arabidopsis thaliana
GTAAGAGGTCAAAAGGTTTCCGCAATGATCCCTCTTTTTTTGTTTCTCTAGTTTCAAGAATTTGGGTATATGACTAACTTCTGAGTGTTCCTTGATGCATATTTGTGATGAGACAAATGTTTGTTCTATGTTTTAG

SEQ ID NO: 154 - DNA, 150 bp, Arabidopsis thaliana
  source 1..150: mol_type = genomic DNA
gtaagttctgcatttggttatgctccttgcattttaggtgttcgtcgcacttccatttccatgaatagctaagattttttttctctgcattcattcttcttgcctcagttctaactgtttgtggtatttttgttttaattattgctacag

SEQ ID NO: 155 - DNA, 121 bp, Arabidopsis thaliana
  source 1..121: mol_type = genomic DNA
gtaaagcaactgtgttttaatcaatttcttgtcaggatatatggattataacttaatttttgagaaatctgtagtatttggcgtgaaatgagtttgctttttggtttctcccgtgttatag

SEQ ID NO: 156 - DNA, 136 bp, Arabidopsis thaliana
  source 1..136: mol_type = genomic DNA
gtaaagtttccaactttcctttaccatatcaaactaaagttcgaaactttttatttgatcaacttcaaggccacccgatctttctattcctgattaatttgtgatgaatccatattgacttttgatggttacgcag

SEQ ID NO: 157 - DNA, 121 bp, Arabidopsis thaliana
  source 1..121: mol_type = genomic DNA
gtctgtctttcctatttcatatgtttaatcctaggaatttgatcaattgattgtatgtatgtcgatcccaagactttcttgttcacttatatcttaactctctctttgctgtttcttgcag

SEQ ID NO: 158 - DNA, 159 bp, Arabidopsis thaliana
  source 1..159: mol_type = genomic DNA
gtaaaatattggatgccagacgatattctttcttttgatttgtaactttttcctgtcaaggtcgataaattttattttttttggtaaaaggtcgataatttttttttggagccattatgtaattttcctaattaactgaaccaaaattatacaaaccag

SEQ ID NO: 159 - DNA, 109 bp, Arabidopsis thaliana
  source 1..109: mol_type = genomic DNA
gtaaggacttctcatgaatattagtggcagattagtgttgttaaagtctttggttagataatcgatgcctcctaattgtccatgttttactggttttctacaattaaag

SEQ ID NO: 160 - DNA, 189 bp, Solanum tuberosum
  source 1..189: mol_type = genomic DNA
gtttgtttctgcttctacctttgatatatatataataattatcattaagtagtagtaatataatatttcaaatatttttttcaaaataaaagaatgtagtatatagcaattgcttttctgtagtttataagtgtgtatattttaatttataacttttctaatatatgaccaaaacatggtgatgtttag

SEQ ID NO: 161 - DNA, 94 bp, Cucumber mosaic virus
  source 1..94: mol_type = other DNA
gtttatttacaagagcgtacggttcaatccctgcctcccctgtaaaactaccctttgaaaacctctctttcttaatcttttctttgtaattcct

SEQ ID NO: 162 - DNA, 74 bp, Brome mosaic virus
  source 1..74: mol_type = other DNA
gtagaccacggaacgaggttcaatcccttgtcgaccacggttctgctacttgttctttgtttttcaccaacaaa

SEQ ID NO: 163 - DNA, 107 bp, Citrus tristeza virus
  source 1..107: mol_type = other DNA
aatttcacaaattcaacctgttcgcccagaaaatacgtctggcacaacagggatccggaataggtccagcctttaagctctaatattcccacaacaaaaattacact

SEQ ID NO: 164 - DNA, 107 bp, Beet yellows virus
  source 1..107: mol_type = other DNA
gtttttaaccatccttctactagacgtacactcgtacatcctctagtatttcctttatttatcttcccataagcccctgcctttaacgtttaactctcgctatcgac

SEQ ID NO: 165 - DNA, 206 bp, Cowpea mosaic virus
  source 1..206: mol_type = other DNA
tattaaaatcaatacaggttttgataaaagcgaacgtggagaaatccaaacctttctttctttcctcaatctcttcaattgcgaacgaaatccaagctttggttttgctgaaacaaatacacaacgtatactgaatttggcaaatttctctctctctctctgtcattttctttcttctgtcgggactttcttagtcttgacccaac

SEQ ID NO: 166 - DNA, 84 bp, Potato virus X
  source 1..84: mol_type = other DNA
gaaaactaaaccatacaccaccaacacaaccaaacccaccacgcccaattgttacacacccgcttggaaaagcaagtctaacaa

SEQ ID NO: 167 - DNA, 161 bp, Potato virus A
  source 1..161: mol_type = other DNA
aaaataaacaaactacaaaacacaatcaagaaatcaaacgaattagagcaatcaatcttctaaatcttcaagcagttcacaacattttaaacacaatcaaaacttgaacaagttcaatcaaacacccaaattcagtttaaatactcaaaacgcaagcatca

SEQ ID NO: 168 - DNA, 184 bp, Potato virus Y
  source 1..184: mol_type = other DNA
aattaaaacaactcaatacaacataagaaaaacaacgcaaaaacactcataaacgctcattctcactcaagcaacttgctaagtttcagtttaaatcatttccttgcaattctctagaacaatattggaaaccatttcaactcaacaagcaatttcatcacttccaaccaatttcagatcctca

SEQ ID NO: 169 - DNA, 167 bp, Pepper mottle virus
  source 1..167: mol_type = other DNA
aaattaaaacataacatacaacataaacgaaagcaatcaaattttcaagcatttttcttgagctctttgatttttcctgcataaattaagcactttgatcaacaacatagtctcgatttgaatatttcaattgtttccagttttctctaatagcactccatactaaa

SEQ ID NO: 170 - DNA, 190 bp, Bean yellow mosaic virus
  source 1..190: mol_type = other DNA
aaaaaatataaaaactaaacaagacaatacaagacataacgcattcagaccttcaaacattcgcaagctttaaacaactttgtgtgaatttcgagtataagatttctaaaattctaaaattaaagtaattagtctttctttaagtgtcaatcaaatttgagtttttcgttattactattgcaagcttata

SEQ ID NO: 171 - DNA, 91 bp, Barley stripe mosaic virus
  source 1..91: mol_type = other DNA
gtatgtaagttgcctttgggtgtaaaatttcttgcatgcacataatcgtaatcgattcttcttgatctctaaacaacactttcccgttagc

SEQ ID NO: 172 - DNA, 115 bp, Wheat stripe mosaic virus
  source 1..115: mol_type = other DNA
cgaaagttaacactgagtacacacgatcccttgataccagcagcatctgtgagcttgtttggttaggcaacgcgggtcgaggtttactctgattgtacactggaaattatcagca

SEQ ID NO: 173 - DNA, 79 bp, Rice yellow mottle virus
  source 1..79: mol_type = other DNA
acaattgaagctaggaaaggagcatattgcgaaagcatccctccttccgacgaacaattgtagccacactgcatcgtgt

SEQ ID NO: 174 - DNA, 139 bp, Maize dwarf mosaic virus
  source 1..139: mol_type = other DNA
aaaaacaacaagactcaacacaacacaaccaaacacgaccaaacacaaccaaattacacgttattggagcacattcagtttgcaggcaacggttcgtttgcaaggtgcatcgaaaagcctctctgaacacacgatcgca

SEQ ID NO: 175 - DNA, 138 bp, Zucchini yellow mosaic virus
  source 1..138: mol_type = other DNA
aaattaaaacaaatcacaaagactacagaaatcaacgaacaagcagacgatttctaaaccgtgtttacaaacaagcaatctataattcgcacagcatcaagaatttctgcaatcactttgtttattttagacacaaca

SEQ ID NO: 176 - DNA, 132 bp, Watermelon mosaic virus
  source 1..132: mol_type = other DNA
aaattaaaactactcataaagacatcaaacaaaacaaacgcaaacaaattctcaagttttcaagctatttcaagcaatttgcattttcgatatttataagtttacgattcatcaatatcaacaacaacacga

SEQ ID NO: 177 - DNA, 148 bp, Sugarcane mosaic virus
  source 1..148: mol_type = other DNA
aaaacaacaaaactcaatacaacacaacaaaacacatccaagcaaaccaacgacatttgcaatcaaacttcagcgcacggctcaaaagagaaggctctttgagaacgctctctgaacttccctccttcggcattcgacttccggcgag

SEQ ID NO: 178 - DNA, 68 bp, Tobacco mosaic virus
  source 1..68: mol_type = other DNA
gtatttttacaacaattaccaacaacaacaaacaacaaacaacattacaattactatttacaattaca

SEQ ID NO: 179 - DNA, 71 bp, Tomato mosaic virus
  source 1..71: mol_type = other DNA
gtatttttacaacaattaccaacaacaacaacaaacaacaacaacattacattttacattctacaactaca

SEQ ID NO: 180 - DNA, 67 bp, Turnip vein-clearing virus
  source 1..67: mol_type = other DNA
gtttagttttattgcaacaacaacaacaaattacaataacaacaaacaaaatacaaacaacaacaac

SEQ ID NO: 181 - DNA, 69 bp, Pepper mild mottle virus
  source 1..69: mol_type = other DNA
gtaaatttttcacaatttaacaacaacaacacaaacaacaaacaacattacaaacaaaatacaactaca

SEQ ID NO: 182 - DNA, 63 bp, Turnip crinkle virus
  source 1..63: mol_type = other DNA
ggtaatctgcaaatccctggcacccgcctaaaattgccctcatcaaccttctctctattcacg

SEQ ID NO: 183 - DNA, 165 bp, Tomato bushy stunt virus
  source 1..165: mol_type = other DNA
naaattctccaggatttctcgacctagttcgtttatctggtgacttgcgctaccgttgctttgcgtagagaatttctctccataattattatctttagttgtggggtttgaaggttgggtctacctttcggggggataaattgtaacttccaacaaacaagcgac

SEQ ID NO: 184 - DNA, 33 bp, Tomato spotted wilt orthotospovirus
  source 1..33: mol_type = other DNA
agagcaatcaggtaacaacgattttaagcaaac

SEQ ID NO: 185 - DNA, 32 bp, Watermelon bud necrosis orthotospovirus
  source 1..32: mol_type = other DNA
agagcaatcgtgcaacaataagaatatcagta

SEQ ID NO: 186 - DNA, 87 bp, Turnip yellow mosaic virus
  source 1..87: mol_type = other DNA
gtaatcaactaccaattccagctctcttttgacaactggtcttatacccacttccgtacacttgcaaccctcgtaagacaattgcaa

SEQ ID NO: 187 - DNA, 281 bp, Cucumber mosaic virus
  source 1..281: mol_type = other DNA
cggtctccctcttcgggcgggatctgagttggcggtaatctgcaaaccgtctgaagtcactaaacacattgtgtggtgaacgggttgtccatccagctaacggctaaaatggtcagtcgtggagaaatccacgccagtagacttacaagtctctgaggcacctttgaaaccatctcctaggtttcttcggaaggacttcggtccgtgtacttctagcacaacgtgctagtttcagggtacgggtgccccccactttcgtgggggtctctaaaaggagacca

SEQ ID NO: 188 - DNA, 274 bp, Brome mosaic virus
  source 1..274: mol_type = other DNA
tgcgcttgtctctgtgtgagacctctgctcgaggagagccctgttccaggtaggaacgttgtggtctaactcaagactagctgaatcggtgctataaccgatagtcgtggttgacacgcagacctcttacaagagtgtctaggcgcctttgagagttactctttgctctcttcggaagaacccttaggggttcgtgcatgggcttgcatagcaagtcttagaatgcgggtgtcgtacagtgttgaaaaacactgtaaatctctaaaagagacca

SEQ ID NO: 189 - DNA, 273 bp, Citrus tristeza virus
  source 1..273: mol_type = other DNA
ttgaagtggacggaataagttcctcgcggaactttgtgttgggttggtaaagacccttatgatggtgatatatcactagacaataaccggatgggtaaagtctttaaaatgatcgaggggaaaattaaccgtatcctctcgttggtctaagctcccacagagtggtagtggtctcaagtgaggcttaacgtatgcgtgaaccaaagaagttctccttagagtgtgtgttgtttacccaacgcactgtccctatggggggccaacataggtcca

SEQ ID NO: 190 - DNA, 182 bp, Beet yellows virus
  source 1..182: mol_type = other DNA
tagagaagtgacggaggcgacctacctaccgtgtaatttaagtcgtcacagagtgacaacggcaccaagtggtgcttagtgcgtatgtaaattacgaagtgcaaaaaatttttctttttatattaagaaaatttttgcacactcctagcgaagtcccgctaggaagaaaaaataaggggccc

SEQ ID NO: 191 - DNA, 72 bp, Potato virus X
  source 1..72: mol_type = other DNA
ctacgtctacataaccgacgcctaccccagtttcatagtattttctggtttgattgtatgaataatataaat

SEQ ID NO: 192 - DNA, 227 bp, Potato virus A
  source 1..227: mol_type = other DNA
taaccgaagtgccgtactattactaagtaagagttcctgttagtatccttgtcttattattagaatacgtttatctttcaacaagtatgatgttcgtgctctcacctcgcaacagtgagtttgagtgggaaataaatactagtattctatggccttacttgttatatagacccaccacatagtgagattttatctcggtgactggttttatgtttcaactgtcaggg

SEQ ID NO: 193 - DNA, 328 bp, Potato virus Y
  source 1..328: mol_type = other DNA
tgtagtgtctctccggacgatatataagtatttacatatgcagtaagtattttggcttttcctgtactacttttatcataattaataatcgtttgaatattactggcagataggggtggtatagcgattccgtcgttgttagtgaccttagctgtcggttctgtattattaagtcttagataaaaagtgccgggttgttgttgtgtgactgatctatcgattaggtgatgctgtgattctgtcatagcagtgactatgtctggatttagttacttgggtgatgctgtgattctgtcatagcagtgactgtaaacttcaatcaggagac

SEQ ID NO: 194 - DNA, 266 bp, Pepper mottle virus
  source 1..266: mol_type = other DNA
ctgatgtggtctctgggatgaaatattattatatgtagtatgcaatatatagtatggcttttctcgttccagtctttatattaatgagagtaacttaagtaagtaatttgtacttcaaggattaatcaaggtgactctctgacactctcagtgaggtgacttgtttagtctgagtttacttattgtgagtataaagaatctctcagaaaacgagagtgacttctagacacactctaggaggtgatcgtagttggcatgagagagac

SEQ ID NO: 195 - DNA, 171 bp, Bean yellow mosaic virus
  source 1..171: mol_type = other DNA
agtatccgtctttaaattctctataatttggcgttacattacttaatactatgtattagtgaggtttcacctccagcattttaaattcagtatgtgtatcattctctctactctgacagggtaagcagttagtgaggttgcctcgtgtgagcctgatctttgtagagcgag

SEQ ID NO: 196 - DNA, 257 bp, Barley stripe mosaic virus
  source 1..257: mol_type = other DNA
aaaaaaaaaaaaaaaaaaatgtttgatcagatcattcaaatctgatggtgcccatcaaccatatgatgggagtgtttgcaagtccactataatcgaacttgaaaacgatgcctgaattggaaaccatgaatcttaacggattctggagagaaaatttaggaattggtatgtaagctacaacttccggtagctgcgtcacactttaagagtgtgcatactgagccgaagctcagcttcggtcccccaagggaagacca

SEQ ID NO: 197 - DNA, 350 bp, Wheat stripe mosaic virus
  source 1..350: mol_type = other DNA
gcgttgtcactcgtccgaagacgttaaactacggtgtcgttcattcgacgtgagattctgagttatgggtattgctacaaacccacacgaggtggtcgtccgtgcctgacattaagttgttgggatagaccagggcaagtcgggactttggctagaagtttgtgggtaacttcactgttaaaccctctggttcaacgtcagaaccacctaggagataatactctgggtttagttggcgtctgttgtaattatttataattcagcattttaaaatttcaagaaggtctttgaccatatagttgtactgggtgtgagttgtaccagtgtgttgttaactatgtttgtgtata

SEQ ID NO: 198 - DNA, 246 bp, Rice yellow mottle virus
  source 1..246: mol_type = other DNA
atccacggattggctacgagatcgacttaccctgaaaaggatgttgagcgttcttgaacgcggcccaatcctacgagatgatactggtgactatcctacgtgaggagttgcactcacgcttcaacccaaagcgacccatgcactggacagtgcttacccagatggttttcggagctactgggcggacctttcaccaaaccgaattccccactctttccgagagaattctcgggatgggtgggggag

SEQ ID NO: 199 - DNA, 250 bp, Maize dwarf mosaic virus
  source 1..250: mol_type = other DNA
tacggggttcaacttttacgcagtaatttagtaatatataagtaagctattgtggtgaggttgtacctcgttagttttatatatatattatgctacgtacctactatgtctgcaagtgagtgaggttgcacctcgacacttatagtgggcactattactagcttcgaatcacgagacggacggtccattgagtggttctaccacgaggatgcagcgagtttcgtggtgagagacaaaaaaaaaaaaaaaa

SEQ ID NO: 200 - DNA, 213 bp, Zucchini yellow mosaic virus
  source 1..213: mol_type = other DNA
taaagggtaggtcacctacctaggttatcgattcgctgccgacgtaattctaatatttaccgctttttatgatatctttagatttcagtgtgggcctcccacctttaaagcgtaaagtttatgttagttgtccaggaatgccgtagtcctgtcggaagctttagtgtgagcctctcacggataagctcgagattagactccgtttgcaagcct

SEQ ID NO: 201 - DNA, 249 bp, Watermelon mosaic virus
  source 1..249: mol_type = other DNA
agactaggtaaactggtcacagttagcatttcgggtcgttataagttttctataatataatatgttgcactttttagtatagtgtgattttatcacctttgtactgtttatgttagtgtggtttaaccatcttagtgtgctttatattatagtttatgcataacagggagaaccattacaataccggagttgtttgtagtgtgattacatcacggttaatagccgaggtacggtaatgtttgttgtcct

SEQ ID NO: 202 - DNA, 235 bp, Sugarcane mosaic virus
  source 1..235: mol_type = other DNA
tctcctggaaaccctgtttgcagtatctatagtatgttatgtgtactagtattaaaagtgaggctttgtctcgtttctgcttttactatttacgtactataagtgtgaaccagtctgcaagatacagggttggacccagtgtcttctggtgtagcacatactagcgtcgagccatgtcacggacagcgctgaggatggctttgccatgtgtgctgcgagtctcatggtgagagac

SEQ ID NO: 203 - DNA, 204 bp, Tobacco mosaic virus
  source 1..204: mol_type = other DNA
ggtagtcaagatgcataataaataacggattgtgtccgtaatcacacgtggtgcgtacgataacgcatagtgtttttccctccacttaaatcgaagggttgtgtcttggatcgcgcgggtcaaatgtatatggttcatatacatccgcaggcacgtaataaagcgaggggttcgaatccccccgttacccccggtaggggccca

SEQ ID NO: 204 - DNA, 201 bp, Tomato mosaic virus
  source 1..201: mol_type = other DNA
atgcataggtgctgaaatataaattttgtgtttctaaaacacacgtggtacgtacgataacgtacagtgtttttccctccacttaaatcgaagggtagtgtcttggagcgcgcggagtaaacatatatggttcatatatgtccgtaggcacgtaaaaaagcgagggattcgaattcccccggaacccccggttggggccca

SEQ ID NO: 205 - DNA, 235 bp, Turnip vein-clearing virus
  source 1..235: mol_type = other DNA
gcgtagtgcgcacgatagcgcatagtgtttttctctccacttaaatcgaagagataaacttacggtgtaattccgtgagggtggcgtaaaccaaattacgcaatgttttgggttccattaaaatcgaaaccccttatttcctggatcacctgttaacgcacgtttgacgtgtattacagtgggaataagtaaaagtgagaggttcgaatcctccctaaccccgggtaggggccca

SEQ ID NO: 206 - DNA, 199 bp, Pepper mild mottle virus
  source 1..199: mol_type = other DNA
acatgatggcataaataagttgaacgaacattaaacgtccgtggcgagtacgataactcgtagtgtttttccctccacttaaatcgaagggttgtcgttgggatggaacgcaattaaatacatgtgtgacgtgtatttgcgaacgacgtaattatttttcaggggttcgaatcccccccgaaccgcgggtagcggccca

SEQ ID NO: 207 - DNA, 255 bp, Turnip crinkle virus
  source 1..255: mol_type = other DNA
tacggtaatagtgtagtcttctcatcttagtagttagctctctcttatattaagaaaagaaaacaaaaacccccaggtcgctttattttgacctgtgttagggaccaaaaacggtggcagcactgtctagctgcgggcattagactggaaaactagtgctctttgggtaaccactaaaatcccgaaagggtgggctgtggtgaccttccgaactaaaagatagcctccctcctcgcgcggggggggggcctgccc

SEQ ID NO: 208 - DNA, 370 bp, Tomato bushy stunt virus
  source 1..370: mol_type = other DNA
gacagactcttcagtctgagtttgtggagatgagtgtaaatctggcatagcatacaggttactcttgttgggttctggatgttaggatgacgagtcgactcgggctccgcactaggtttggtcgcctaggggatggagatatggaaagggtctcgtgtggtatcagtcggtcgaaagacgcgcttccaacatgggcctatggtcggataagtcttagcaataccagccagcatgaattggattcctgtttacgaaagttaggtgtcacttgtggaagcggacccagacacggttgatctcacccttcggggggctatagagatcgctggaagcactaccggacaaccggaacattgcagaaatgcagccc

SEQ ID NO: 209 - DNA, 241 bp, Tomato spotted wilt orthotospovirus
  source 1..241: mol_type = other DNA
attaatagtaatgctcaacaatgcatggataatggattagatagaacttagaatacaaatttattgttattttagaattaggttagatctgattagactaaagacgatttggtgaaccaaatctatagtgtatgtaaatgtggagtcccggtatagtttcactggagggaattcttatatatcttatttgtaaagtctggttatggagagattatatgttttagttgtacctgattgctct

SEQ ID NO: 210 - DNA, 215 bp, Watermelon bud necrosis orthotospovirus
  source 1..215: mol_type = other DNA
ataagccatagaatagacagtatagaaccagaagcagtaaaagagcatgacaacaaaagggttttttcttttgcaaaaggatgaaagtattctaaatcagtttaaaatgcaatgtagttgtagtatctagaatcaacagtagagtcagaaatagtatttcttaataaaattgagactgagtgtagaatacttttgttttgttgctcgattgctct

SEQ ID NO: 211 - DNA, 105 bp, Turnip yellow mosaic virus
  source 1..105: mol_type = other DNA
gttctcgatctttaaaatcgttagctcgccagttagcgaggtctgtccccacacgacagataatcgggtgcaactcccgcccctcttccgagggtcatcggaacc

SEQ ID NO: 212 - DNA, 4851 bp, Tobacco mosaic virus
  source 1..4851: mol_type = other DNA
atggcatacacacagacagctaccacatcagctttgctggacactgtccgaggaaacaactccttggtcaatgatctagcaaagcgtcgtctttacgacacagcggttgaagagtttaacgctcgtgaccgcaggcccaaggtgaacttttcaaaagtaataagcgaggagcagacgcttattgctacccgggcgtatccagaattccaaattacattttataacacgcaaaatgccgtgcattcgcttgcaggtggattgcgatctttagaactggaatatctgatgatgcaaattccctacggatcattgacttatgacataggcgggaattttgcatcgcatctgttcaagggacgagcatatgtacactgctgcatgcccaacctggacgttcgagacatcatgcggcacgaaggccagaaagacagtattgaactatacctttctaggctagagagaggggggaaaacagtccccaacttccaaaaggaagcatttgacagatacgcagaaattcctgaagacgctgtctgtcacaatactttccagacaatgcgacatcagccgatgcagcaatcaggcagagtgtatgccattgcgctacacagcatatatgacataccagccgatgagttcggggcggcactcttgaggaaaaatgtccatacgtgctatgccgctttccacttctctgagaacctgcttcttgaagattcatacgtcaatttggacgaaatcaacgcgtgtttttcgcgcgatggagacaagttgaccttttcttttgcatcagagagtactcttaattattgtcatagttattctaatattcttaagtatgtgtgcaaaacttacttcccggcctctaatagagaggtttacatgaaggagtttttagtcaccagagttaatacctggttttgtaagttttctagaatagatacttttcttttgtacaaaggtgtggcccataaaagtgtagatagtgagcagttttatactgcaatggaagacgcatggcattacaaaaagactcttgcaatgtgcaacagcgagagaatcctccttgaggattcatcatcagtcaattactggtttcccaaaatgagggatatggtcatcgtaccattattcgacatttctttggagactagtaagaggacgcgcaaggaagtcttagtgtccaaggatttcgtgtttacagtgcttaaccacattcgaacataccaggcgaaagctcttacatacgcaaatgttttgtcctttgtcgaatcgattcgatcgagggtaatcattaacggtgtgacagcgaggtccgaatgggatgtggacaaatctttgttacaatccttgtccatgacgttttacctgcatactaagcttgccgttctaaaggatgacttactgattagcaagtttagtctcggttcgaaaacggtgtgccagcatgtgtgggatgagatttcgctggcgtttgggaacgcatttccctccgtgaaagagaggctcttgaacaggaaacttatcagagtggcaggcgacgcattagagatcagggtgcctgatctatatgtgaccttccacgacagattagtgactgagtacaaggcctctgtggacatgcctgcgcttgacattaggaagaagatggaagaaacggaagtgatgtacaatgcactttcagagttatcggtgttaagggagtctgacaaattcgatgttgatgttttttcccagatgtgccaatctttggaagttgacccaatgacggcagcgaaggttatagtcgcggtcatgagcaatgagagcggtctgactctcacatttgaacgacctactgaggcgaatgttgcgctagctttacaggatcaagagaaggcttcagaaggtgctttggtagttacctcaagagaagttgaagaaccgtccatgaagggttcgatggccagaggagagttacaattagctggtcttgctggagatcatccggagtcgtcctattctaagaacgaggagatagagtctttagagcagtttcatatggcaacggcagattcgttaattcgtaagcagatgagctcgattgtgtacacgggtccgattaaagttcagcaaatgaaaaactttatcgatagcctggtagcatcactatctgctgcggtgtcgaatctcgtcaagatcctcaaagatacagctgctattgaccttgaaacccgtcaaaagtttggagtcttggatgttgcatctaggaagtggttaatcaaaccaacggccaagagtcatgcatggggtgttgttgaaacccacgcgaggaagtatcatgtggcgcttttggaatatgatgagcagggtgtggtgacatgcgatgattggagaagagtagctgtcagctctgagtctgttgtttattccgacatggcgaaactcagaactctgcgcagactgcttcgaaacggagaaccgcatgtcagtagcgcaaaggttgttcttgtggacggagttccgggctgtgggaaaaccaaagaaattctttccagggttaattttgatgaagatctaattttagtacctgggaagcaagccgcggaaatgatcagaagacgtgcgaattcctcagggattattgtggccacgaaggacaacgttaaaaccgttgattctttcatgatgaattttgggaaaagcacacgctgtcagttcaagaggttattcattgatgaagggttgatgttgcatactggttgtgttaattttcttgtggcgatgtcattgtgcgaaattgcatatgtttacggagacacacagcagattccatacatcaatagagtttcaggattcccgtaccccgcccattttgccaaattggaagttgacgaggtggagacacgcagaactactctccgttgtccagccgatgtcacacattatctgaacaggagatatgagggctttgtcatgagcacttcttcggttaaaaagtctgtttcgcaggagatggtcggcggagccgccgtgatcaatccgatctcaaaacccttgcatggcaagatcctgacttttacccaatcggataaagaagctctgctttcaagagggtattcagatgttcacactgtgcatgaagtgcaaggcgagacatactctgatgtttcactagttaggttaacccctacaccagtctccatcattgcaggagacagcccacatgttttggtcgcattgtcaaggcacacctgttcgctcaagtactacactgttgttatggatcctttagttagtatcattagagatctagagaaacttagctcgtacttgttagatatgtataaggtcgatgcaggaacacaatagcaattacagattgactcggtgttcaaaggttccaatctttttgttgcagcgccaaagactggtgatatttctgatatgcagttttactatgataagtgtctcccaggcaacagcaccatgatgaataattttgatgctgttaccatgaggttgactgacatttcattgaatgtcaaagattgcatattggatatgtctaagtctgttgctgcgcctaaggatcaaatcaaaccactaatacctatggtacgaacggcggcagaaatgccacgccagactggactattggaaaatttagtggcgatgattaaaaggaactttaacgcacccgagttgtctggcatcattgatattgaaaatactgcatctttagttgtagataagttttttgatagttatttgcttaaagaaaaaagaaaaccaaataaaaatgtttctttgttcagtagagagtctctcaatagatggttagaaaagcaggaacaggtaacaataggccagctcgcagattttgattttgtagatttgccagcagttgatcagtacagacacatgattaaagcacaacccaagcaaaaattggacacttcaatccaaacggagtacccggctttgcagacgattgtgtaccattcaaaaaagatcaatgcaatatttggcccgttgtttagtgagcttactaggcaattactggacagtgttgattcgagcagatttttgtttttcacaagaaagacaccagcgcagattgaggatttcttcggagatctcgacagtcatgtgccgatggatgtcttggagctggatatatcaaaatacgacaaatctcagaatgaattccactgtgcagtagaatacgagatctggcgaagattgggttttgaagacttcttgggagaagtttggaaacaagggcatagaaagaccaccctcaaggattataccgcaggtataaaaacttgcatctggtatcaaagaaagagcggggacgtcacgacgttcattggaaacactgtgatcattgctgcatgtttggcctcgatgcttccgatggagaaaataatcaaaggagccttttgcggtgacgatagtctgctgtactttccaaagggttgtgagtttccggatgtgcaacactccgcgaatcttatgtggaattttgaagcaaaactgtttaaaaaacagtatggatacttttgcggaagatatgtaatacatcacgacagaggatgcattgtgtattacgatcccctaaagttgatctcgaaacttggtgctaaacacatcaaggattgggaacacttggaggagttcagaaggtctctttgtgatgttgctgtttcgttgaacaattgtgcgtattacacacagttggacgacgctgtatgggaggttcataagaccgcccctccaggttcgtttgtttataaaagtctggtgaagtatttgtctgataaagttctttttagaagtttgtttatagatggctctagttgttaa

SEQ ID NO: 213 - DNA, 4851 bp, Tomato mosaic virus
  source 1..4851: mol_type = other DNA
atggcatacacacaaacagccacatcgtccgctttgcttgagaccgtccgaggtaacaataccttggtcaacgatcttgcaaagcggcgtctatatgacacagcggtagatgaatttaatgctagggaccgcaggcctaaagtcaatttttccaaagtagtaagcgaagaacagacgcttattgcaaccaaagcctacccagaattccaaattacattctacaacacgcagaatgctgtgcattcccttgcaggcggtctccgatcattagaattggaatatctgatgatgcaaattccctacggatcattgacatatgatatcggaggtaattttgcatctcatctgttcaaagggcgagcatacgttcactgctgtatgccgaatctagatgtccgcgacataatgcggcacgagggccaaaaggacagtattgaactatacctttctaggctcgagaggggcaacaaacatgtcccaaacttccaaaaggaagctttcgacagatacgctgaaatgccaaacgaagtagtctgtcacgatactttccaaacgtgtaggcattctcaagaatgttacacgggaagagtgtatgctattgctttgcatagtatatacgatatacctgccgacgagttcggcgcggcactgctgagaaagaatgtacatgtatgttatgccgctttccacttttccgagaatttacttctcgaagattcacacgtcaacctcgatgagatcaatgcatgtttccaaagagatggagacaggttgactttttcctttgcatctgagagtactcttaattatagtcatagttattctaatattcttaagtatgtttgcaaaacttacttcccagcctctaatagagaggtttacatgaaggagtttttagtaactagagttaatacctggttttgtaaattttctagaatagatactttcttattgtacaaaggtgtagcgcataagggtgtagatagtgagcagttttacaaggctatggaagacgcatggcactacaaaaagactcttgcgatgtgcaacagtgaaagaatcttgttagaggattcttcatcagttaattactggtttccaaaaatgagggatatggtgatagttccactatttgacatatctctcgagactagtaaaagaacacgcaaagaggtcttagtttcaaaggactttgtttatacagtgttaaatcacattcgtacgtaccaggccaaagcgcttacttactccaacgtgttatctttcgtcgaatcaattcgttcgagagtgatcattaacggggttactgccaggtctgagtgggatgtcgataaatcattattacagtccttgtcgatgacgttcttcctacataccaagcttgccgttctgaaagacgatcttttgattagcaagtttgcacttggaccaaaaactgtctcacaacatgtgtgggatgagatttccctagctttcggcaatgctttcccatcgatcaaggaaagattgataaaccggaaactgatcaaaattacggagaatgcgttagagatcagggtgcccgatctttatgtcactttccatgataggttagtttctgagtacaaaatgtcagtggacatgccggtgctagacattaggaaaaagatggaagaaactgaggaaatgtacaatgcactgtccgaactgtctgtacttaaaaattcagacaagttcgatgttgatgttttttcccagatgtgccaatctttagaagttgatccaatgactgcagcaaaggtaatagtagcagttatgagcaacgagagtggtcttactctcacgtttgaacagcccaccgaagctaatgttgcgctagcattgcaagattctgaaaaggcttctgatggggcgttggtagttacctcaagagatgttgaggaaccgtccataaagggttcgatggcccgtggtgagttacaattggccggattatctggcgacgttcctgaatcttcatacactaggagcgaggagattgagtctctcgagcagtttcatatggcaacagctagttcgttaattcataagcagatgtgttcgatcgtgtacacgggccctcttaaagttcaacaaatgaaaaactttatagacagcctggtagcctcgctctctgctgcggtgtcgaatctagtgaagatcctaaaagatacagccgcgattgaccttgaaactcgtcaaaagttcggagttctggatgttgcttcgaaaaggtggctagttaaaccatccgcaaagaaccatgcatggggggttgttgagactcatgcgaggaaatatcacgtcgcattactggagcacgatgaatttggcattattacgtgcgataactggcgacgggtggctgtgagttctgagtcggtagtatattctgatatggctaaactcaggactctgagaagattgctcaaagatggagaaccacacgttagttcagcaaaggtggttttggtggatggcgttccagggtgcgggaagacaaaggaaattctttcgagagttaatttcgaagaagatctaattcttgtccctggtcgtcaagctgccgagatgatcagaagaagagctaatgcgtcgggcataatagtggctacaaaggataatgtgcgcaccgtcgattcatttttgatgaattacgggaaaggggcacgctgtcagttcaaaagattgttcatagacgaaggtttgatgctgcatactggttgtgtgaatttcttggttgaaatgtctctgtgcgatattgcatatgtttatggagacacccaacaaattccgtacatcaacagagtaactggtttcccgtaccctgcgcactttgcaaaattggaggtcgacgaagtcgaaacaagaagaactactcttcgctgtccggctgatgtcacacacttcctaaatcaaaggtatgaaggacacgtaatgtgcacgtcttctgaaaagaaatcagtttcccaggaaatggttagtggggctgcgtctatcaatcctgtgtccaagccgcttaaagggaaaattttgactttcacacagtctgacaaggaggcccttctctcaaggggctacgcagatgtccatactgtacatgaggtacaaggtgagacttatgcagacgtatcgttagttcgactaacacctacgcctgtatctatcatcgcaagagacagtccgcatgttctggtctcgttgtcaagacacacaaaatccctaaagtactacaccgttgtgatggatcctttagttagtatcattagagatttagaacgggttagtagttacttattagacatgtacaaagtagatgcaggtactcaatagcaattacaggtcgactctgtgtttaaaaatttcaatctttttgtagcagctccaaagactggagatatatctgatatgcaattttactatgataagtgtcttcctgggaacagcacgttgttgaacaactacgacgctgttaccatgaaattgactgacatttctctgaatgtcaaagattgcatattagatatgtctaagtctgtagctgctccgaaagatgtcaaaccaactttaataccgatggtacgaacggcggcagaaatgcctcgccagactggactgttggaaaatctagttgcgatgattaaaagaaattttaattcaccagagttgtccggagtagttgatattgaaaatactgcatctttagtggtagataagttttttgatagttatttacttaaggaaaaaagaaaaccaaacaaaaatttttcactgtttagtagagagtctctcaataggtggatagcaaagcaagaacaagtcacaattggtcagttggccgattttgattttgtggatcttccagccgttgatcagtacaggcatatgattaaagcgcaaccgaagcagaaactggatctgtcaattcagacagaatatccagcgttgcaaacgattgtgtatcattcaaagaaaatcaacgcaatatttggtcctcttttcagtgagcttacaaggcaattacttgacagtattgactcaagcagattcttgttctttacgagaaagacaccggctcagatcgaagatttcttcggagatctagacagtcatgtcccaatggacgtacttgagttggatgtttcgaagtatgataagtctcaaaacgagtttcattgtgctgttgagtacgaaatctggaggagactgggtctggaggatttcttggcagaagtgtggaaacaagggcatagaaaaaccaccctgaaagattacactgctggtataaaaacgtgtttatggtaccagagaaagagtggtgatgttacaacttttatcggtaataccgtcatcattgcttcgtgtcttgcatcaatgctcccgatggaaaaattgataaaaggagccttctgcggagatgacagtttgttgtactttcctaagggttgtgagtatcccgatatacaacaagctgccaatctaatgtggaattttgaggccaaactgttcaagaagcaatatgggtacttctgcgggaggtacgtgattcatcacgatagaggttgcatagtatactacgaccctttgaagctgatttcgaaacttggtgctaaacacatcaaggattgggatcatttggaggagttcagaagatccctctgtgatgttgctgagtcgttgaacaattgcgcgtattacacacaattggacgacgctgttggggaggttcataaaaccgccccacctggttcgtttgtttataagagtttagttaagtatttgtcagataaagttttgtttagaagtttatttcttgatggctctagttgttaa

SEQ ID NO: 214 - DNA, 4806 bp, Turnip vein-clearing virus
  source 1..4806: mol_type = other DNA
atggcacaatttcaacaaacaattgacatgcaaactctccaagccgctgcgggacgcaacagcttggtgaatgatttggcatctcgtcgcgtttacgataatgcagtcgaggagctgaatgctcgttccagacgtcccaaggttcatttctccaaggcagtgtctacggaacagacactgattgcaacaaacgcatatccggagttcgagatttcctttactcatacgcaatccgctgtgcactccttggccggaggccttcggtcacttgagttggagtatctcatgatgcaagttccgttcggttctctgacgtacgacatcggcggtaacttttccgcgcaccttttcaaagggcgcgattacgttcactgctgcatgcctaatctggatgtacgtgacattgctcgccatgaaggacacaaggaagctatttacagttatgtgaatcgtttgaaaaggcagcagcgtcctgtgcctgaataccagagggcagctttcaacaactacgctgagaacccgcacttcgtccattgcgacaaacctttccaacagtgtgaattgacgacagcgtatggcactgacacctacgctgtagctctccatagcatttatgatatccctgttgaggagttcggttctgcgctactcaggaagaatgtgaaaacttgtttcgcggcctttcatttccatgagaatatgcttctagattgtgatacagtcacactcgatgagattggagctacttttcagaagtccggtgataatttaagttttttctttcataatgagagcactctcaattacacccacagttttagtaatataattaagtatgtgtgtaaaacgttctttcctgctagtcaacggtttgtgtatcataaggagtttttagttactagagtcaacacttggtactgtaagtttacgagagtggatacttttactcttttccgtggtgtgtaccataataatgtggattgcgaagagttttacaaggctatggacgatgcgtggcactacaaaaagacgttagcaatgcttaatgccgagaggaccatcttcaaggataacgctgcgttaaacttttggttcccgaaagtgagagacatggttatcgtccctctctttgacgcttctatcacaactggtaggatgtctaggagagagattatggtgaacaaggatttcgtttatacggtcctaaatcacataaaaacgtatcaagctaaggctttaacttacgcaaatgttctgtcctttgtggagtctattaggtctagagtgataattaacggtgtcactgccaggtctgaatgggacacagacaaggcaattctaggtccattagcaatgacatttttccttataacaaagttgggtcatgtgcaggatgaaataatcctgaaaaagttccagaagttcgacagaaccaccaatgagctgatttggacaagtctctgcgatgccctgatgggggttattccctcggtcaaggagacgcttgtgcgcggtggttttgtgaaagtagcagaacaagccttagagataaaggttcccgagctatactgtacctttgccgacagattggtactacagtacaagaaggcggaggagttccaatcgtgtgatctttccaaacctctagaagagtcagagaagtactacaacgcattatccgagctatcagtgcttgagaatctcgactcttttgacttagaggcgtttaagactttatgtcagcagaagaatgtggacccggatatggcagcaaaggtggtcgtagcaatcatgaagtcagaattgacgttgcctttcaagaaacctacagaagaggaaatctcggagtcgctaaaaccaggagaggggtcgtgtgcagagcataaggaagtgttgagcttacaaaatgatgctccgttcccgtgtgtgaaaaatctagttgaaggttccgtgccggcgtatggaatgtgtcctaagggtggtggtttcgacaaattggatgtggacattgctgatttccatctcaagagtgtagatgcagttaaaaagggaactatgatgtctgcggtgtacacagggtctatcaaagttcaacaaatgaagaactacatagattacttaagtgcgtcgctggcagctacagtctcaaacctctgcaaggtgcttagagatgttcacggcgttgacccagagtcacaggagaaatctggagtgtgggatgttaggagaggacgttggttacttaaacctaatgcgaaaagtcacgcgtggggtgtggcagaagacgccaaccacaagttggttattgtgttactcaactgggatgacggaaagccggtttgtgatgagacatggttcagggtggcggtgtcaagcgattccttgatatattcggatatgggaaaacttaagacgctcacgtcttgcagtccaaatggtgagccaccggagcctaacgccaaagtaattttggtcgatggtgttcccggttgtggaaaaacgaaggagattatcgaaaaggtaaacttctctgaagacttgattttagtccctgggaaggaagcttctaagatgatcatccggagggccaaccaagctggtgtgataagagcggataaggacaatgttagaacggtggattccttcttgatgcatccttctagaagggtgtttaagaggttgtttatcgatgaaggactaatgctgcatacaggttgtgtaaatttcctactgctgctatctcaatgtgacgtcgcatatgtgtatggggacacaaagcaaattccgttcatttgcagagtcgcgaactttccgtatccagcgcattttgcaaaactcgtcgctgatgagaaggaggttagaagagttacgctcaggtgcccggctgatgttacgtatttccttaacaagaagtatgacggggcggtgatgtgtaccagcgcggtagagagatccgtgaaggcagaagtggtgagaggaaagggtgcattgaacccaataaccttaccgttggagggtaaaattttgaccttcacacaagctgacaagttcgagttactggagaagggttacaaggatgtgaacactgtgcacgaggtgcaaggggagacgtacgagaagactgctattgtgcgcttgacatcaactccgttagagatcatatcgagtgcgtcacctcatgttttggtggcgctgacaagacacacaacgtgttgtaaatattacaccgttgtgttggacccgatggtgaatgtgatttcagaaatggagaagttgtccaatttccttcttgacatgtatagagttgaagcgggggtccaatagcaattacagatcgatgcagtattcagggacagcaacttgtttgttcagacgcccaagtcaggagattggcgagatatgcaattttactatgacgctcttcttcccggaaacagtactattctcaatgaatttgatgctgttacgatgaatttgagggatatttccttaaacgtcaaagattgcagaatcgacttctccaaatccgtgcaacttcctaaagaacaacctattttcctcaagcctaaaataagaactgcggcagaaatgccgagaactgcaggtttgctggaaaatttggttgcaatgatcaaaagaaacatgaatgcgccggatttgacagggacaattgacattgaggatactgcatctctggtggttgaaaagttttgggattcgtatgttgacaaggaatttagtggaacgaacgaaatgaccatgacaagggaaagtttttctagatggctttcgaaacaagagtcatctacagttggtcagttagcggactttaactttgtggatttgccggcagtagatgagtacaagcatatgatcaagagtcaaccaaagcaaaagttagacttgagtattcaagacgaatatcctgcattgcagacgatagtctaccattcgaaaaagatcaatgcgattttcggtccaatgttttcagaacttacgaggatgttactcgaaaggattgactcttcgaagtttctgttctacaccagaaagacacctgcacaaatagaggacttcttttctgacctagactcaacccaggcgatggaaattctggaactcgacatttcgaagtacgataagtcacaaaacgagttccattgtgctgtagagtacaagatctgggaaaagttaggaattgatgagtggctagctgaggtatggaaacaaggacacagaaaaacgaccttgaaagattatacggccggagtcaaaacatgtctttggtatcaaaggaaaagtggtgatgtgacaacctttattggtaataccatcatcattgcagcctgtttgagctcaatgatccccatggacaaagtgataaaggcagctttttgtggagacgatagcctgatttacattcctaaaggtttagacttgcctgatattcaggcgggcgcgaacctcatgtggaacttcgaggccaaactcttcaggaagaagtatggttacttctgtggtcgttatgttattcaccatgatagaggagccattgtgtattacgatccgcttaaactaatatctaagttaggttgtaaacatattagagatgttgttcacttagaagagttacgcgagtctttgtgtgatgtagctagtaacttaaataattgtgcgtatttttcacagttagatgaggccgttgccgaggttcataagaccgcggtaggcggttcgtttgctttttgtagtataattaagtatttgtcagataagagattgtttagagatttgttctttgtttga

SEQ ID NO: 215 - DNA, 4839 bp, Pepper mild mottle virus
  source 1..4839: mol_type = other DNA
atggcttacacacaacaagctaccaacgccgcattagcaagtactctccgagggaataaccccttggtgaacgatcttgctaatcggagactgtacgaatcagcggtcgaacaatgcaatgcacatgaccgcaggcccaaggttaattttttaaggtcgataagcgaagagcagacgcttatcgcaactaaggcctaccctgagttccaaatcacgttctacaacacgcagaacgctgtgcacagtctcgcaggtggacttcggtctttggaactagaatacttgatgatgcagatcccctacggttcaacgacatatgatatcgggggaaattttgctgctcacatgtttaaaggtcgtgactacgttcattgctgcatgcctaacatggacttacgtgacgtcatgcgtcacaatgctcaaaaggatagcattgaactgtacctttcaaagcttgcgcaaaagaaaaaggtaataccgccatatcaaaagccatgctttgataaatacacggacgatccgcaatcagtagtgtgctcgaaaccttttcagcactgcgaaggcgtttcgcactgcacggataaagtatacgctgtcgctttgcacagtttatacgacattccagcagatgaatttggggcagcacttctgaggagaaatgttcatgtctgctatgctgccttccacttttctgagaatcttcttttagaagattcgtatgtcagtcttgacgacataggcgctttcttctcgagagagggcgatatgttgaacttttcttttgtagcagagagtactttaaattatactcattcctatagtaatgtgcttaagtatgtgtgtaagacttacttccccgcttctagtagagaagtgtacatgaaggagtttttggtaactagggtaaatacttggttttgtaagttttcaaggttagatacctttgtactatatagaggtgtataccacagaggtgtagacaaggagcaattttacagtgcaatggaagatgcttggcattacaaaaagactttggcgatgatgaatagcgaaagaatcctcttagaggattcatcgtctgttaattattggtttccaaagatgaaagatatggtgatagtacctttgttcgacgtatctttacagaacgaggggaaaaggttagcaagaaaggaggtcatggtcagcaaggacttcgtttatactgtgcttaatcatattcgcacataccagtcgaaagcgcttacttacgccaatgtattatcgttcgttgagtcgataagatcaagagtgataatcaatggggtgactgcgcgctcagagtgggatgtggataaggctttgttgcagtccctgtcaatgacttttttcttgcagaccaaattggccatgctcaaggatgacctcgtggttcagaaattccaagtgcattccaaatcgctcactgaatatgtctgggatgagattactgctgcttttcacaattgttttcctacaatcaaggagaggttgattaacaagaaactcataactgtttcggaaaaggctcttgaaattaaagtacctgatttgtatgtaactttccacgatagattggttaaggagtacaagtcttcggtggaaatgccggtactggacgttaaaaagagcttggaagaagcagaagtgatgtacaatgctttgtcagaaatctcaattcttaaagacagtgacaagtttgatgttgatgttttttcccggatgtgtaatacattaggcgtagatccattggtggcagcaaaggtaatggtagctgtggtttcaaatgagagtggtttgaccttaacgtttgagaggcctaccgaagcaaatgtcgcacttgcattgcaaccgacaattacatcaaaggaggaaggttcgttgaagattgtgtcgtcagacgtaggtgagtcctcaatcaaggaagtggttcgaaaatcagagatttctatgcttggtctaacaggcaacacagtgtccgatgagttccaaagaagtacagaaatcgagtcgttgcagcagttccatatggtatccacagagacgattatccgtaaacagatgcatgcgatggtgtatactggtccgctaaaagttcaacaatgcaagaactatttagacagcctggtagcctcgctctctgctgcggtatcaaacctgaagaagataatcaaagacacagctgctatagatctcgagactaaggaaaaatttggagtctacgacgtgtgccttaagaaatggttggtgaaacctctatcaaaaggacatgcttggggtgtggtgatggactcagactataagtgctttgttgcgcttctcacatacgatggcgagaacattgtgtgcggagagacatggcgtagagtcgcagtgagctccgaatctttggtgtattcagatatggggaagataagagctatacgctctgtgcttaaagacggtgaaccccatataagcagtgcaaaggttacacttgttgatggtgttcctggttgcggaaagacaaaggagattctttcgagggtcaactttgacgaagatctagttctggtaccaggaaaacaggctgctgaaatgataagaagaagggcaaacagttctggtttaatcgtggcgaccaaggagaatgtaaggacggtagactctttcttaatgaattacggtcgaggtccgtgccaatacaaaaggctgtttctggatgaaggtctaatgttacaccctggttgtgttaattttctggttggcatgtctctatgctccgaggcttttgtttatggagacacccagcagattccttacatcaacagagttgcaacttttccctatcctaagcatttgagtcaactcgaggtcgatgctgttgaaactcgcagaacaacgttgcggtgtccagctgatatcaccttcttcttgaatcagaagtacgaagggcaagttatgtgcacatcaagtgttacacgctcggtgtcacacgaggtcatccaaggtgcagcggtaatgaatccagtgtctaaaccacttaaagggaaggtgattacattcactcagtcagacaagtcattgctgctctcgaggggttacgaagatgtgcataccgttcatgaggtgcaaggggaaacgtttgaagacgtctcactagtgaggctgacgccaacacccgtgggaataatttcaaagcagagtccgcacctgttggtctcattgtctaggcatacaaggtcgatcaaatattacacagttgtgctagatgcagtcgtttcagtgcttagagatctggagtgtgtgagtagttacctgttagatatgtacaaagttgatgtgtcgactcaatagcaattacagatagaatcggtgtacaaaggtgttaaccttttcgtcgcagcaccaaaaacaggagatgtttctgacatgcaatattattacgacaagtgtttgccgggaaacagtactatactcaatgagtatgatgctgtaactatgcaaatacgagagaatagtttgaatgtcaaggattgtgtgttggatatgtcgaaatcggtgcctcttccgagagaatctgagacgacattgaaacctgtgatcaggactgctgctgaaaaacctcgaaaacctggattgttggaaaatttggtcgcgatgatcaaaagaaatttcaactctcccgaattagtaggggttgttgacatcgaagacaccgcttctctagtagtagataagttttttgatgcatacttaattaaagaaaagaaaaaaccaaaaaatatacctctgctttcaagggcgagtttggaaagatggatcgaaaagcaagagaagtcaacaattggccagttggctgattttgactttattgatttaccagccgttgatcaatacaggcacatgatcaagcagcagccgaaacagcgtttggatcttagtattcaaactgaatacccggctttgcaaactattgtgtatcatagcaagaaaatcaatgcgctttttggtcctgtattttcagaattaacaagacagctgctagagacaattgacagttcaagattcatgttttatacaaggaaaacgcctacacagatcgaagaatttttctcagatctggactctaatgttcctatggacatattagagctagacatttccaagtatgacaaatcacagaacgaatttcattgtgcagtcgagtatgagatttggaaaaggttaggcttagacgatttcttggctgaagtttggaaacacgggcatcggaagacaacgttgaaagactacacagccggaataaaaacgtgtttgtggtaccagaggaaaagcggtgatgtcaccacattcattggaaacacgatcattattgctgcatgtctgtcctctatgctaccgatggagagattgattaaaggtgccttttgtggtgatgatagtatattatactttccaaagggcactgatttccccgatattcaacagggcgcaaaccttctctggaattttgaagccaagttgtttaggaagagatatggttacttttgcggtaggtacataattcaccatgacagaggctgtattgtatattatgaccctctaaaattgatctcgaaactcggtgcaaaacacatcaagaatagagaacatttagaggaatttaggacctctctttgtgatgttgctgggtcgttgaacaattgtgcgtactatacacatttgaacgacgctgtcggtgaggttattaagaccgcacctcttggttcgtttgtttatagagcattagttaagtacttgtgtgataaaaggttatttcaaacattgtttttggagtaa

SEQ ID NO: 216 - DNA, 2391 bp, Turnip crinkle virus
  source 1..2391: mol_type = other DNA
atgcctcttctacacacactcaacacagcgctcgcagtgggactcctaggagccaggtactaccctgaggttcaaaccttcttggggctgcctgactacgtgggtcacatgaagaatgtagtacggtctgttttccagggatctgggctagtagtagtgtcctccgacacagtcggtgtcagggggacgtatagtaatagaggtcagataggtagtagtctcgggtgtatactagccgttccggatagcggggcggatatagaaatagacttagataggttggtaggaacggaagaggaagccacatcctgtttggtggaggcggtaggtagtaccgcagatgtccccaggaggagagttcgtcaaaaggggcggtttgccatgcatgccgtcaacgcagcaaagctgcacttttgtggcgtcccaaaacccactgaagcgaatcgactagcggtctcaaaatggcttgtccaatactgcaaagagagacatgtcgtagacagccacatcagaacgatagtcaatacggctcttcctagagtgttcacgcctgacgcggaagacattcaggtcgtgctggatttgcacagtgtaagagcacacgaccaccgcaacgccctagccgaagcaggcaaagtgcggaagtggtgggtcaatctcgcgatgcatcccatgactgggaggtcgtggtccagggcttggaggcgattatgccgactgcctgacgaccaggcgatctcttttgtccgctaggggtgcttgcgggagctggtcgggagggagactcaaatctccaggggtgaaaacccggccatgcgcgtgttcccgttagcaaatcccccgaaggttcgacgcatcttccatatctgtggaatgggcaatggtttagactttggagtccacaacaactcactcaacaatttgagaagagggttgatggaaagagtcttttacgttgaagatgcgcagaagcaattgaaaccagccccccaaccgatcccagggattttcgggaagttgagtgggattcggagacgattggtcaggttggccggaaatcatacccctgtgcctcgggagaaatacccgtcgttctacaagggcaggagggccaccatataccaaaaggctttggattctctacatgacagaccggtatcccggaaggacgcagaactcaaaacattcgtgaaggcagaaaagatcaatttcacggctaagaaagacccggctccacgggtcatccagccgagggacccacgatataatattgaggttgggaaatacttgaaaccgtacgagcaccatttatatcgggcaattgacgctatgtggggtgggcccactgtgctgaaaggatacgatgtgggggagcttggaaacattatgagtaacacctgggataaattccggaaaacgtgtgcgataggatttgacatgaagagattcgaccagcacgtatccgtggacgccctacgatgggaacacagtgtatacaacgcgggctttaactgtcccgagttggcacagctgctaacttggcagttgaccaacaagggggttgggagagcctccgatggctttatcaaataccaagttgatggttgtcgcatgtccggagatgttaacacagccttgggcaactgcctactggcttgctctatcaccaagtacttaatgaagggaatcaaatgcaaattaatcaacaatggagacgattgtgtgctgttcttcgaagctgatgaagtcgacagggtgcgcgaaaggctgcatcattggatcgactttgggtttcaatgcatagcggaagaaccacaatacgaattggagaaagttgaattttgccagatgtcccctattttcgatggtgaagggtgggtcatggtcagaaacccccgtgtgagcctctccaaggacagctacagcaccacacaatgggcgaatgagaaagatgcagccagatggttggctgccatcggagagtgtggcttggctattgcaggtggcgtaccagtgttacaatcatattattcttgcctgaagaggaattttggacccctggccggggactacaagaagaagatgcaagatgtttcctttgatagtggattctacaggttatccaagaacgggatgaggggcagcaaagacgtgtcccaagatgctaggttcagcttttaccgggggttcggctacactccagacgagcaggaagcgcttgaggagtactacgacaacctcgaactgctctgtgagtgggaccccacgggatataaagaagaacttagtgatagatggatcctgaacgaattccctacaactctctaagcgacagcgacgcaacaggaaaacggaagaaaggcggagagaaaagtgcgaagaagagattgg

SEQ ID NO: 217 - DNA, 816 bp, Turnip crinkle virus
  source 1..816: mol_type = other DNA
atgcctcttctacacacactcaacacagcgctcgcagtgggactcctaggagccaggtactaccctgaggttcaaaccttcttggggctgcctgactacgtgggtcacatgaagaatgtagtacggtctgttttccagggatctgggctagtagtagtgtcctccgacacagtcggtgtcagggggacgtatagtaatagaggtcagataggtagtagtctcgggtgtatactagccgttccggatagcggggcggatatagaaatagacttagataggttggtaggaacggaagaggaagccacatcctgtttggtggaggcggtaggtagtaccgcagatgtccccaggaggagagttcgtcaaaaggggcggtttgccatgcatgccgtcaacgcagcaaagctgcacttttgtggcgtcccaaaacccactgaagcgaatcgactagcggtctcaaaatggcttgtccaatactgcaaagagagacatgtcgtagacagccacatcagaacgatagtcaatacggctcttcctagagtgttcacgcctgacgcggaagacattcaggtcgtgctggatttgcacagtgtaagagcacacgaccaccgcaacgccctagccgaagcaggcaaagtgcggaagtggtgggtcaatctcgcgatgcatcccatgactgggaggtcgtggtccagggcttggaggcgattatgccgactgcctgacgaccaggcgatctcttttgtccgctaggggtgcttgcgggagctggtcgggagggagactcaaatctccaggggtgaaaacccggccatg

SEQ ID NO: 218 - DNA, 2457 bp, Tomato bushy stunt virus
  source 1..2457: mol_type = other DNA
atggagaccatcaagagaatgatttggcctaagaaagagatttttgtgggtgatttcgcaaccggagtgaataggacagttccggtgaacatctttcaattggtgtgtcgtgtggttctgagatacatgaggacagggaaaatagagtgtgattctgacagcatgactaagtttatagttgaattactcaaaactgattgtgctgccaaatgggaatggttcatgaagagacggcagaggggtgattacattgtccctctatctatagcctccataccaatcataccgctgttgagttatgccactagggtacgcgcagtctcagtcaaggcttttggcaatgaactatcgttcaatgtcagggtgcctagaccatctgtacctaagaaaggattgctcctcagactggcggcaggtctagcgttagctcctatatgcgcgctggccgtgtacgctaccctacctagggaaaaactgtcggtatttaagctgagaactgaggcacgagcacacatggaggatgagagagaagcgacagattgtctggtggttgagccggcaagggaacttaagggtaaagatggtgaggatctcctcactggtagtagattgactaaggtgatcgcgtccactgggcgccctcgtcgaagaccttatgcggcaaagatcgcacaggtggcgagagcaaaggtgggttaccttaagaacagtccagagaatagactaatctaccagagggtgatgatcgagatcatggacaaagactgcgtcaggtatgttgacagggatgtcatattgcctttggctattggatgctgttttgtctatccggatggagtggaggagtcggcggcactatggggctcacaggagtccctgggtgtcaaatagggaggcctagtacgtctacctggggttgtaacacagatcaatcgagatatcccatctgatgtgttacttcctcaggaggtgctagaggttcgtacaggacctcccaatgctaaggaccgtaatatatttatggttgcaggttgcccatcacaggcacggttcttagtacataatcactgcctgaaaaaccttaaaaggggtcttgtggagagagtcttctgcgtagagagaaacgggaagctcgctcgcactccacaacctaccaaaggagcctttggacgtctttccccgttcaggaaagcggtttgtgagaaggttggggtagcccaccgacttgggtatgatgggtttctgtcatactacagcggtgcgaaactccgtacttacacacgagccgtggagagtctgcatatcacacctgtctccgagagggatagtcacttgactaccttcgtaaaagcagagaagatatcgacgtctaagggtgacccagcacctcgggtgattcagcctcgaaacccgaggtacaatgtggaacttggaagatatctacggcatatggaatccaagctgatgaaagctgttgatggcgtgttcggagagacgacatgcatcaaaggatacacagctgatgaggtaggtgcaattttccgggctaaatgggacaggtttgataagcctgtcgccatagggctcgatgcatctaggtttgatcaacactgttccgttgaagcattgcaatatgagcatagcttctacagggccatgtaccctggcaacaagctcttgggcaagttgttggaatggcagctccataataaaggtaaaggttatgttccagatggaactataacctatcgcaaggagggctgtcgcatgagtggggatataaacacctcgttgggcaactatctactgatgtgtgcaatggtacatgggtacatgcgtcatctggggattaatgagtttagtctggcaaactgtggggatgattgcgtcctaattgtcgaacgcaggaatcttaagcagatacagagaactttaccggagtatttcctcaatctgggatatactatgaaggtggagcaacctgtatttcaactggaagaggttgaattttgccaggcacacccagtacagtttcaaggcggttggaagatggttcgaaacgtccgtactgctatgagcaaggatgtgcactgtgtcaacaatatacgcgatttggcgacgaggagagcttggagtaatgctcaacatcatgggggtctagcgcttagtgctggtattccagttgtggagacgttttactctaggtttaagctttatgatgtacctcgtaaacatcaacgtattgacacggtcacaaatgtgcacaagtggcgtggatccggtgggagttatgttgtgacccctgaatctagggctagcttttgggctgcctttggactcacgggggatgagcaactggctctggaggaccgtctggaaagatgggagatggatctgtttggagaggagggtgttgacgctcatgagcccagcatcctcgactccgccgtagcttga

SEQ ID NO: 219 - DNA, 891 bp, Tomato bushy stunt virus
  source 1..891: mol_type = other DNA
atggagaccatcaagagaatgatttggcctaagaaagagatttttgtgggtgatttcgcaaccggagtgaataggacagttccggtgaacatctttcaattggtgtgtcgtgtggttctgagatacatgaggacagggaaaatagagtgtgattctgacagcatgactaagtttatagttgaattactcaaaactgattgtgctgccaaatgggaatggttcatgaagagacggcagaggggtgattacattgtccctctatctatagcctccataccaatcataccgctgttgagttatgccactagggtacgcgcagtctcagtcaaggcttttggcaatgaactatcgttcaatgtcagggtgcctagaccatctgtacctaagaaaggattgctcctcagactggcggcaggtctagcgttagctcctatatgcgcgctggccgtgtacgctaccctacctagggaaaaactgtcggtatttaagctgagaactgaggcacgagcacacatggaggatgagagagaagcgacagattgtctggtggttgagccggcaagggaacttaagggtaaagatggtgaggatctcctcactggtagtagattgactaaggtgatcgcgtccactgggcgccctcgtcgaagaccttatgcggcaaagatcgcacaggtggcgagagcaaaggtgggttaccttaagaacagtccagagaatagactaatctaccagagggtgatgatcgagatcatggacaaagactgcgtcaggtatgttgacagggatgtcatattgcctttggctattggatgctgttttgtctatccggatggagtggaggagtcggcggcactatggggctcacaggagtccctgggtgtcaaatag

SEQ ID NO: 220 - DNA, 8640 bp, Tomato spotted wilt orthotospovirus
  source 1..8640: mol_type = other DNA
atgaacatccagaaaatacaaaaattaatagaaaatggaaccactttattgttatctattgaggattgtgtaggttctaaccatgatctggctttggatttacataagagaaatagtgatgagattccagaagatgtgattattaataataatgcaaaaaactatgagacgatgagagaattaattgtcaaaatcactgctgatggagaagggctaaacaaagggatggcaactgtggatgttaagaagctaggtgagatggtctctctgtttgagcaaaaatacttagaaacagagttagcaaggcatgatattttcggagagctgatctccagacacctaagaataaaacccaaacaaagaagcgaggtggagatagagcatgcactcagagaatatctggatgatctcaacaaaaagtcctgtgttaacaagctttctgatgatgagtttgagagaataaacaaagaatatgtggcaactaacgccacccctgataactatgtaatatataaagaatcaaaaaacagtgaactctgtttaatcatttatgattggaaaatatctgttgatgccaggactgaaaccaaaacaatggaaaaatactacaaaaatatctggaaatctttcaaagatataaaagtgaatggaaagccattcctagaagatcaccctgttttcgtttctattgttatattgaaacctattgctggaatgccaatcactgttactagcagtagggtattgggaaaatttgaagactctccatcagcattgcatggagaaagagtaaagcatgctagaaatgccaaactgctaaatatttcttatgttggaaaaatcgtaggaaccacgcccacagtggtgagaaactattatgcaaacactcagaaaatcaaatctgaagtcagaggaatcttaggtgatgattttggatccaaagatgtgttttttagtcactggactagcaaatacaaagagagaaatcctactgaaatagcctattctgaagatattgaaagaataattaactcacttgttacagaagaaatccctaaggaagagataatacattttttgtttggaaatttctgtttccacattgaaacgatgaatgaccagcatattgctgacaaatttaaagggtaccaaaactcttgtattaatttaaaaatagagccaaaagctgatttagctgatttgaaagaccacttgatccaaaaacagcaaatatgggaatctttgtatgggaaacaccttgagaagatcatgcttagaattagagaaaaaaagaaaaaagagaaagaaatacctgacataactacagcttttaaccagaatgccacagaatatgaagaaaagtatcctaactgttttacaaacgatctttctgaaactaaaactaacttttccatgacttggtccccaagttttgaaaaaattgaattgggctcagaagtagattacaataacgcaatcataaacaaatttcgggaaagcttcaaaagttcttcaagaattatttacaatagcccatatagtagcataaataaccaaacaaacaaagcaagagatataacaaacttggttagactgtgtttaacagagttaagttgtgatacaacaaaaatggaaaaacaggaacttgaggatgaaatagatataaacactgggagcattaaagttgagagaacaaaaaaatctaaagaatggagtaagcagggttcatgtttgaccaggaacaaaaatgaattttgcatgaaagagacaggcaaggagaacaaaactacctattttaaaggtttagcagtaatgaatataggaatgagctctaagaaaagaattctaaaaaaagaagaaataaaagaaaggatttctaaaggcctggaatatgatacctcagaaaggcaggctgacccaaatgatgattattcaagtatagacatgtcttctctgactcataggaaaaaactaattaggcacgacaatgaggacagcttaagctggtgtgaaagaattaaagattctttgtttattcttcataatggtgatataagagaggaaggcaagatcacatctgtttacaataattatgctaaaaatcccgaatgcttgtacattcaagattcagtattgaaagctgaactggagacttgtaaaaaaataaacaaattatgcaatgacctagccatttaccattactctgaagacatgatgcaattctccaaaggtttgatggtggcagacaggtatatgactaaagaaagtttcaagatactaactacagcaaatactagcatgttgctactggcatttaaaggagatggaatgaacaccggaggatcgggagttccttacatagcattgcacatagtggatgaagacatgtcagatcaatttaacatatgttatactaaagaaatttatagctatttccgaagtggtagtaattacatttatataatgagaccgcagagactcaaccaggtgaggctgctgagccttttcaaaacgcctagcaaagttcctgtatgttttgcacaattttcaaagaaagctaacgaaatggaaaaatggctgaaaaacaaagatatagaaaaagtgaatgtcttttctatgacaatgactgtaaaacagatattaataaatattgtattctcgtctgtcatgataggtactgtgacaaagctcagcaggatgggaatttttgatttcatgcggtatgctgggtttttgccactgtctgattattctaatataaaagaatacattagagataaatttgaccctgatataactaacgtggcagatatatattttgttaatggaatcaaaaaactattgttcagaatggaagatctcaatttaagcacaaatgccaagcctgttgtcgtagaccacgaaaacgatattataggaggtataacaaacttgaatataaaatgtccaataacaggatcgactttactaacactagaggatttgtacaataatgtttatttggctatttatatgatgcctaaatcattgcacaatcatgttcacaatctaacaagtttgttaaatgtccctgctgagtgggagctaaagttcagaaaagaattaggtttcaacatatttgaagacatataccctaagaaagcaatgtttgacgacaaagacctattctctataaatggagctctgaacgtgaaagcattatccgattactatctagggaatatagacaatgttggtttgatgagatcagaaatagaaaataaagaagatttcctgagcccgtgttacaagatatctactttaaaatcttcaaaaaagtgctcacaatcaaacattataagcactgatgagataatagagtgtctccagaacgcaaagattcaagatatagaaaactggaaagggaataatttggctattataaaagggcttataagaacttacaatgaggaaagaaatcgattagtggaattctttgaagataattgtgtcaattcgttgtatcttgtagaaaagcttaaagagataattaatagtggattgataactgcagggaaatctgtaacatccaaattcataagaaataaccatccattaacagtagaaacatatctcaaaacaaaactatattatagaaataatgtaacagttttaaagtctaaaaaagtgtcagaggagctttatgaccttgtaaaacagtttcataacatgatggaaatagatctagattctgttatgaaccttggtaaaggcacagaagggaagaaacacacattcttgcagatgcttgaatttgtcatgtccaaggctaaaaatgtcacagggtctgtagattttttagtttctgtttttgaaaaaatgcagagaactaaaacagacagagaaatatacttgatgagcatgaaagtgaaaatgatgctttactttatagagcacacattcaaacatgtagcacagagtgatccatcagaagctatctctataagtggagacaacaaaataagggcactttctacattatctttggacacaatcacatcttacaatgatattttgaacaaaaattcaaagaagtcaagattggctttcttatctgccgatcagtcgaaatggtcagcatcagaccttacctataaatatgttttagctatcatattaaatccaattttaactactggtgaagccagcttgatgatagaatgcattttaatgtatgttaaattgaaaaaggtttgtataccaacggatatttttttgaacctaagaaaagctcaaggaacttttgggcaaaatgaaactgccataggacttttgactaaaggtttgacgacaaacacatacccggttagcatgaactggttgcaaggcaatttaaattatctgtcgtctgtttatcattcttgtgcaatgaaagcttatcacaagactctagaatgttacaaagactgcgatttccaaactagatggattgtgcactctgatgacaatgcgacatcattgatagccagtggagaggtcgataaaatgctaacagatttttcaagctcatctctgccagaaatgttgtttagaagcattgaagctcatttcaaaagcttttgcataactttgaaccctaaaaagagttatgcttcttcatcagaagtagagtttatatctgaaagaattgtaaatggagcaattattcctctctattgcagacatttagcaaactgttgcacagaatcttcacatataagttattttgatgatttgatgtcactcagtatacatgttacaatgcttttgaggaaaggctgtcccaatgaagtaataccttttgcttatggggctgtgcaagtacaagcattaagcatctattcaatgcttcctggtgaagtgaatgatagcattaggatttttaaaaaacttggagtaagtttaaaatcaaacgagattcccacaaacatggggggctggttaacttctcctatagagccattgtctatattaggtccatcatcaaatgatcaaattatctattacaatgtgataagagattttttgaacaaaaaaagtttagaagaggtcaaagatagtgtctcttcttctagttatctacagatgagattcagagagttaaaagaaaagtatgaaagaggaactctggaagaaaaagacaaaaagatgatatttcttactaatttgtttgagaaagcatcagtgtccgaagattcagacgttctaacaatcgggatgaaatttcaaaccatgttaactcagatcataaaattgcctaatttcataaatgaaaatgctttaaataagatgtcaagttataaggatttctcaaaactttaccctaatctaaaaaagaatgaagatctatataagagtactaagaacttgaagatagacgaggatgctgttttagaggaagatgagttatatgagaagattgcgtctagcttagaaatggagtctgtccatgacataatgataaaaaatcctgaaacaattctgatagcaccattgaatgatagggattttttacttagtcagctgtttatgtacacaagcccttccaaaaggaatcaattatcgaaccaatctacagagaaacttgctttagatagggtattaaggtcaaaagctagaacatttgtggacatttcttccactgtgaagatgacttatgaagaaaacatggaaaagaaaatcttagaaatgctaaaatttgatttagattcatattgttcatttaaaacatgtgtaaatctagtaatcaaagatgttaatttcagcatgctgattccaatattggattctgcatacccttgtgaatctagaaaaagagataattacaatttcaggtggtttcagactgagaaatggatacctgttgttgaaggctctccgggactagtagtgatgcatgctgtttatggatcaaattatatagaaaatttaggtttaaaaaacatccctctaacagatgatagcattaatgttttaacaagcacatttggaacaggtctaatcatagaagatgtgaaatctctagttaaaggtaaagacagctttgaaacagaggcttttagtaattctaatgaatgtcaaagattggtgaaagcatgcaactatatgatagcagcacaaaacaggcttttagcaattaacacatgcttcactaggaaaagcttccctttctattccaagttcaatctagggagaggatttatttcaaacacactagctctcctatccaccatctacagcaaagaagaatcctatcattttgtttctacagctagttataaactagacaaaaccatcagaactgtgataagcgctcagcaagatatgaacttggaaaaaatactggacactgctgtatacatatcagataaattgcagtcacttttcccaacaattactagagaagatatagctttgatattacaaaatgtgtgccttgacagcaagcctatatggcagagtctagaagacaaaatgaaaaggattaacaattcaacagctagtggcttcacagtatcaaatgtgatcctatcacataacagtgaattgaacacaatccagaaacaaattgtctggatgtggaacatgggtttgtgttctcatagaacattagattttgttatcagatatattcgaagaagtgatgtaagatatgtgaaaactgaagaacaagacgaatcacgaaattatgtctctggaacaatgtacaaaattgggatcatgacaagaagctgttatgttcaattgatagcttctgatcatgatgtagcagtttctttgagaacaccattcgagatattgaatgaaagagagtatctttttgatacatacagagagagtatagagaaattgctgcagaaatttatgtttgataaagtgaacataataaagtcaaaacaaccacagattgtcttcttagaaccaggagatgcctgcattagaatgactacagataacaaaatgattgtcaaggttaatgccacatcaagacaaataagactagagaatgtaaaattagttgtgaagataaaatatgaaaatgtgaactctgatgtatgggatattatagaaggccaaaagtctctagtcttgaggcttcctgaagtaggggaatgtttctctgatatgtacaaaactgcagactctgaaaccgaaacaatcaaaaccataaaaaacaggctcatgacctctttaactttcatagaagcctttggaaacttatcacagcagatcaaagagattgtatatgatgatatcagagaaacaatggatgaattcttaatgaacatccgggatacctgcttagaaggtttggaaaactgcaaaagtgtagaagaatatgataattatctcgatgaagatggttttaatgacacagtggaactattcgaaaacttgctaagaacacatgataactttgaagatgagtatagtcctctgttttcagagattgttgataaagcaaaacagtacactagagatttagaaggtttcaaagaaatactgctcatgcttaaatattccctgataaatgatgcatcgggatttaaaagctatagagccactggaatgcatgctgttgaactaatggcaaaaaaacacatagaaataggagaattcaacttgttaggaatgatccaactgattaaagcttgtgaaacatgccacaacaatgactctatattaaacttagcaagtttgaggaatgttcttagcaggacatatgccacattcgggaggagaataggattgaaccatgatctggacttgcaaaacaatttaatggaaaaaagttgtgatttcaagacgctggttttaccagacataaaattatcagaactatctagggagatactgaaagaaaatgggtttgttatatctggagagaatctaaaaatggataggtctgatgaagaatttgagggtcttgctagttttaatgtgttgaggctagatgaggaagaaatgtatgaaggtttgatcaaagaaatgaaaattaaaaggaaaaagaaagggtttttattcccggcaaatacacttctactaagtgagttgataaaattcttgattggagggataaagggaaccagttttgatatagagacattgttgcggaacagttttagaccagacatattttcgaccgacagattgggtaggttgagttctagtgtacctgcactcagagtttatgcaactgtttatatggaatataagaatgcaaattgtcccttaaatgagatagctgacagcttggaaggttatctaaaactgacaaaaagcaagcctaaggagcatttcttgcatggaagagtcaagaaagccttgatacaattaagagatgaacaatcacgaactaaaaaattagaggtttataaagatatcgcaaatttcctttccagacatccactatgtttgtcagagaaaaccttgtatggaagatacacctactctgatattaatgattatatcatgcaaacaagagagattattttgagtaaaataagtgagttggatgaggttgttgaaacagatgaggacaatttcttgcttagttatctaagaggagaagaagatgcctttgatgaagatgaaattgatgaagaagaagatacagattaa

SEQ ID NO: 221 - DNA, 8669 bp, Watermelon bud necrosis orthotospovirus
  source 1..8669: mol_type = other DNA
atgaacattcaaactataaacagttttctagatgcttcaggcgaaaccactgcatatctgcagagaataaaagatgaaatcatgttaatgtcaaatgttatagaacaaggttattctgaaggtaaaggtgtaattgaatctggattgagttctataatgtctatgaattatattctagacaagattgaagacatgaaatcaaaataccatcagagctcctcttctattgatcaaagagaaatggaaacagaaatctatttatttctcgataaatataaagaactagagttgatgaggcatgatctctttggtgttcttgctggaagaagattacattttgttccaaaacacagatctgatgtttttatgaaagattgtcttatgtcttatatagagttctgcagtgcttcagtgtccatttcgaacaaaatagacaaccttgatagtctaaaagaaaaattgatcttccagcacctaacaccagacaattacacaatatacaaagaaaccaaaggtgagaaagcatgtttgatgatatatgattggaaagtgtctgtagatgctgtgtctgaaggcaagacgtcagaaaactattacacaagtgtttggaaaacttttaaagatatcactatagacgaagaaccttttttagagagacacccaatattcataaccattgttgtgttgaatcctagcggtaatatgccaattgtggcaacaacttgccgggtcgtccaggagttcaggaactcaccatataaaaccttcaatgaccgcaaacgagctgctgaagcagcaaagctaatatcagttaattctctaggtcagcttataggtctgggtgctgactgttttaggcggttttactcagaaacacaatcgtttaagaactctctcttatctaaggttggcaagtatatgaacaggtcatcggaggttttctttagccactggtcatgtgaatacaggaaaactaatttatcaaacaatcaaattagtcaagatattattgatttgatcaattccttgcctaacgatgtggtggggaaggagatccttgttcattttctttttgggaattatttatacttcaaagagactatgagtgaacttcatctcaaagatagatttgaggggtacagatcacactgcaaaatgatgagaattcgtcctttggaaaatgaagaaaaacttaaagactatcttgatagaaatgagcatatttttgagagtttgtatgaaacacatctcaaaaagataaaatcagatgtgctactcagaaaatctaaagaaatagagatagaaagcatagagcgagctttcaacattaatgcagaggagtaccaaaaagagtatcctggatgtttcacaaatgatcttcaagaaactaaaacaaacttttcaatctgctggtcaccaatgacagaagaactaaagatgaatgatcttaattataataatgcaataatacaatctttcagagatgctttgagtgaacagccaaagcttattcaccataaatcatatggtggggctaaagtagacacttatttttccacaactctttttaatttagttagagcttgtctagtagatctaagtacagatacaacgggacattcaaaggctaccttagaagacgtagtggatattaaagatggcagcatccaggtaaaaagaactgaagcctcacagagatggagagaaatagggaatgtcaagactagaaatgggaatgagttcacgttatcaccgcaagcagacactgaagcaagaaagaattttttcagaggtttaaacttgatgtatgttgacatggggaagaaaaagaagatagatataaagaatgaattaaaaagcaagatccaggagtcaatggctcagcaaaagaatgaaaacatggatggcccgagcggggagtatgatgtgtcaaaagccaatatacctcaccaaacgagcctcaaagggatcacacataacaaaaagctaatcagacatgataacccagatgttaaatatcattgtgagtcaatgattgaatctatgtacgtccttcatggtatggacgaaagaaaagataaaaatagtaaaataaattctgtctacaatgaatattgctcaaatccttcttcactatttactaaaggcaatttgatagaaactgaaatgacaattgcaaagaatatccatgaagtagctaaggaactttcaatttacacatatagtgaagacatgatgcagatggcaaaaggtttgatggtggctgacaggtttatgaagaaaacagacttcaagatcttaacttgtgccaatacaagcatgatatgcctagcattcaaaggtgacggcataaacacagggaagtcaggtgtgccttacatcaccatacacaaggtagacaagagcatccaaccacactttgtttctttatacacaaaagaactaatagtgtcttttaaatcagagaattattttattaatatcatgaggccacaaaggctaaatcaggtgcgacttctcagcctgttcaaagctcctagtaaagtccctatcctcttttcacaatattccttattgagtacagagataaaaaaatggttgaatcagcaatccatagatgttttcacttgccctgaaaataagatccagtatctgcaaaagatattattctcctctgtgatcattggcactgtgaccaaactcagcagaatgggaatttttgatttcatgaggtatgcacggtttctaccactgtctgattattccaatataaaggaatatatagctgagaagtttgacccagatataacaaatgttattgattgtttttttgtttctggaattaagaatcttcttctgaaaatggaaggtataaatttaagtaatagtataaaacctctgactatagatcaagaaaatgatatgtctggaggtatatcagatttagacatcatatgccctatcacaggatctacactaaagactatagagtgtctgtataacaatgtctatcttgcaatttacatgatgccgaaatctctccacactcatgtacacaatctcacaacacttctgagtgtcccggctgaatgggaaattaagtttagagaaaaaatgggctttatgataggagatgaaattaaaccaaagaaagaaatgttcaatgattctggtccattctcaattaatggagtgctcaatgtgaaaactttgtttgattattacaagaaaaatattacaaatgttggtgcttgtagatcaaatatagaagaaaaagaggattttttgtctgctccatataaaataaaaactttaacatcatctaaaaaatgctcaaaggcagatatcataaaaagtacagagatagttgctgctttaaaatcatcatatggaaaacagccagatgatataaagggttcagacctttatatactgaagggagttctgaagtgttttgatgaagatagagattcattaaccaacttcttggaggtagaaggcttagaagagtcaaaatatttacatttttttaccaacatgatgtcaggtgataataaaatattgatgaaaactaaccaagacaaattttattataaaagtcatcctttgacagtggagacatttatgaaagttaggtatggttatttcaagacaaccactgttttaaaatcaaaaaaagtaagtgaggaattgtatgatttaatcaaagagttcaacaagataacagaggttgacctggaagctttggaaaagctaggtcgtggactaaaaggcaatcgagtcacatttatacaattattggaatttattttgatgaaatccagaaccaatgctgggaacacagatttcttggtatcaatatttgaaaagatgcagagaacaaagatggatagagagatttatcttatgagcatgaaaacaaaaatgatgttgtattttatagagcatacatacaagcatgtggctcaatctgatccttctgaagccatctcgatctctggagactacaaaattaaaaatttggcatctttatcatatgatactataactaattacaacacagctcttcagaaaaatcttgaatgcaaaatggcttttttatctgcagatcaatcaaaatggtctgcatcagatctaacctataaatacatcttggctgttattatgaatcctcttttaaccacaggagaaataaacctgatgtgtgagtgcataatgatgtatgtaaagttgaagagagtttgtattcctaccgacatctttctaaacctaaaaagagggcaaactgaatatggatcttatggaactgcactgtctgttttaacagataacttagaaacaaatacatttcctgtatccatgaactggctccaagggaatttgaattatctttcgtcagtgtaccactcttgtgcaatgatgggctatgaaaaagctatgaaaaagatgggaaactatgatttcactataagatggatggtgcattcagatgataatgctacttctatggtggttagaggggatataaaagaacttcttgccgagtttaattgcaccagtctgtcagaactgcttttccggagtatacaatcacattttaaaagttattgcataacattaaatccaaaaaagagctatgcctcagaatcagaggtagaatttatatctgaacgaataattaatggtgctgtcatacccttgtattgtagacacttagctaattgtagcacggaaagttcccataatagctattttggtgatctgatgtcactttctatacatataacaatgctcttaagaaaaggatgtcctaatgagctgataccatttgcttatgctgcaatacaaatccaatttctcagcatttactcaatgcttcctggggaagaaaatgatatatcaactattgtcaaagaaattgattttcccttatcaaaaagagaaatcccgatatgtgctggtggttggatgtatgcacctatagaattattgtctatcttaggtccttcatcaaacgatcaattgatttactacaaaatcatcctagatttttttaacctaaaagattttagtagtcttaagaaaagcgtcaactctttaggctacattgatttaagaatcaatgaattgttcaaaagaataaaatatcaaaaaataacaaatgcggataaaaaaatgatatgcatggttaacttatttaaaacaagtttgatgtctgaagactgtgacagtttaaatgtaggaatgaagttccaatccatgatcacacaaattataaaactacctagttttgttagtgaaggctcactgttgaagaactcaagtttccaagacttctgtaagctattccccaatttgaagaaaaacactgacatactcaacgcattaaaacctgttaacttggatgaaagaagccttgaagagttaaatgagagcaaatttttatcacaaatccagctagaagagttgagtaggcacatggcatctcatccagaatcgtttttgatagcaccaatgaatgacaaagattacattttgaccaatctctatacgtatagcagtgtaagcaaaaggaatcaaatgttaaatcaatcaactgagaaattggcattggatagaattttaaggtctaaagctaaaaccttcttagatcccaattcaaaagagatggtttcatataaagaaaatatgtctatgaaaatgagagagataatgagctatgctgggaatgacttcaaaattattaatactatatccagccttatggtgagagacatgaattttgaaatggtcgtctctttaatggagaacactgttgctaatgcttctattcctaaagcgaattataattttagatggttcataactgaaaaagtaccaagtgtcattgagggatcccccggtttaattgttatgtcagctgtttatggcatggattatttgatagagctaggactcaaaaaactccctttgacagaaacctctatctctatactgcatgacatctttggtaacagaaaaacatttgatgatgttaaagagtgtatacagaatgttaaaaagcaatacaagacagaagaatttcaaaatgcagatgttctaaagagatatgtattaagtataaattacatgatccagtcccaaaacaagcttctgtctatcaacacatgtttctccaggaagaatttccctttctattcaaaatataatctaggtaagacgttcataaccaatactttagctatatggagcactatatacagccgattgacaaatataaacttttacaccaatctgaattttgtaattgacaggagttctaggttgattatctcattgcaaagagacatgaatctagaaaaactaattgattgctgtgcctatgtttctgacagattgcaaagcttatttcccgatatgaccgtagagtctatccggcaagttttgtgcaggctaaattttaatggggtagatcttatgaagaaaatgaaatctgaaatagctgaggtaaaaagagccataaacaacataaagacatccactcatgtaactctctcattcaggccacaaatgatagcaatgagcaaacatgcagcatggttatacaattttggatatattaatgagaaagagttcaaatttgtcatagatcagatcagacaaagcgaagtccattatattaaaacagatgagcaagatgtcagaggttactatgtttcaggtcatacatacaaaatagggatcaaaacccagcataactatggacagcttgctatgtcaaaccaagatgtgtcaatccatctccactcaccgtatgaatacaagagagaagatgatgggaaaatatgggatgttcatgttagatctgtatataaattgcttcaaaagctcttaatggacaagcaaagtgtaattaaagcatttttaaatattagaacagaactaatgcccaatcaattttgtattcatgagagttcaaataaaactctattgatattgatcaatgatacaacccgaccaatctcattagagagaatcaaattcaaaggtgatataaaatacattccctcctctgactttgcctgggacatgatgagcaatcagtctaaatacagattgcgacaagcagaaacaggagaatgttacacagaattatacaaactaatagacaacaatgataatttgatgaacactattttaacaaatttaaagaaaagcttagaatatgggaatgaaatggagaaccttatagagcaatcaatccaagggatagatgatgcagatactattgaatatatccaagagtctgttgaccaaatccacaaattagccatagaaggtttagaaacatgtcagacatcagatgaatttgaaaactacctaaaaagagttgattttcaatctacagttgatttccataaagatcttttagagcagattgttgaggaaaaatatggttcagcagaaagactagatgttgctgtagagaagctaaccaaatggacaaacagtttatcaacatttaaagatgtgtgcacaatgttaaagttctccatggtcaatgattctaagggaattaaaacatataaagctaatggagctgatttccactcattatcagcaagtgaagtcatgacttcacaaggatttgatttgttcgaattactgaagttaataaaggcctgtgaagcttgccacaccagcaattcagtattgaacttaattgcttttaaaaatatcaaaaacaaaaccttcatcccagggtttaagagacacttgcccaatacagttcattttgactatgaaatgaaactaaataatgaagtgatgaacaaattctatgagtataaaacaatctcactacaagatataaaagtttctgatagagtaaagagggtccttgaaacaaatgggttcagtatcacaggccacaatttgaagttagaagaaacaaacttagaattgaaccccgtggagattatagatgactcttccacttatgatcaggttgccaagcaaatgaggttaacaaagaaaaagagctcatatcttatacctgctaacactctattgttaggagaactaatgaagttcttgatgctgtgcatcaaaggagaagaacatgatataatgaaacttttgagaagtcattttgcaatgcagcctgtaagagaaaatagattgctttgtatccaagatgctgttatgacatgcaggataagtggttatatccaaagacactttctcaatgacaagaaagaaatcgtactgttaggtgtagctgacagcttagagaacttcatttccttagcaactccaaactatgcaacacaggagccatttaaagcagaggctttgataaaaaaagccctggcagaagtgtatgattccggtaaatataagatactaaaaaatataagaaattatatagttgatgatgtagaatttcttacagaaaagtgtttatattcaaacataactaatgaggagataagcaacatgatatttaatgcagttagcaaaattgatctggaattatccaatttaaagccaaagaagagaaagaaaagactagacttacatgacgttttcaatggattcttgggatcagatgctactacttcggaacaacaataaaaaggaggtaatctatgggcgggaggaaagga

SEQ ID NO: 222 - DNA, 5535 bp, Turnip yellow mosaic virus
  source 1..5535: mol_type = other DNA
atggccttccaattagcattggacgcccttgcacccacgactcacagagatccctctctgcacccgattctcgaatccacagtggattcaattcgctcctcgatacagacctacccatggtccattccgaaggaacttctacccctactcaactcctacggcatcccaacatctggtttgggaacctcccaccacccccacgccgcccacaagacaatcgagacttttctcctttgcacccactggtctttccaggccaccactcccagctccgtcatgttcatgaaacccagcaagttcaacaaacttgcccaggtaaactcaaactttcgggagctgaagaactaccgcctgcaccccaacgacagcactcgttaccccttcacatcaccagaccttcccgttttccccaccattttcatgcacgacgccctgatgtattaccatccgtcccagatcatggacctgttcttncggaaaccaaacctcgaacgtctgtacgccagcctcgtagtgccacccgaggcccatctttccgaccaatccttctacccaaagttgtacacgtacacgacgacccgccacactcttcactacgtcccagagggtcacgaagccggcagctacaaccaaccgtccgacgcccactcttggctccgaatcaattccattcgcctcggcaaccaccacctctcagtgacgatcctggaatcctggggccccgtccactcgctcctcattcaacgagggacccccccccccgacccatcactccaggcccctccaacactcatgncctcagacctctttcggtcttaccaagancctcgcctcgacgtggtctccttccgaatccccgacgccatcgaacttccacaggccacattcctccaacaaccacttcgagaccgactggtcccccgagccgtctacaacgccctgttcacctataccagagcagtccgcacactccgaacttcagacccagcagcattcgtaaggatgcactcctccaaaccggaccacgattgggtcacctcgaacgcctgggacaacctgcaaaccttcgcacttctgaacgttcccctccgaccaaacgtcgtctaccacgttcttcagagcccaatcgcctccctaagcctttacctgaggcaacattggcgccgtcttaccgccaccgccgtccctatcctctccttcctaaccctcctgcagcgcttccttccattgcctatacctctagcagaggtaaaatccatcacagccttccgaagggagctttaccgaaagaaggagccccaccaccccctcgacgtcttccatctccagcaccgcgtccgcaactaccactccgcgatctcggccgtacgcccggcttccccaccccaccaaaaactcccacacgcactccagaaagccgcattactgcttctccgaccgatatcgcccctcttgacagcgaccccgttctttcggtccgaacagaagtccatgctcccgaacgccgaactttcatggaccctgaagcgcttcgctctgccctggcaagcctccctagtcctcctcgctctgtcggaatcatccatactgctccacaaactgttctccccgccaaccctccaagcccaacacgacacctaccaccgacatctccaccctggatcctacagtctccagtgggagaggacgccattgtcgattccgaggacgacagcatttcttcctttcactcccacgacttcgacagcccctccggaccgctccgaagccagtctccctcccgctttcgcctccaccttcgttccccgtccacctccagcggcatcgagccctggagcccagcctcctacgactacggcagcgcccccgacaccgattgaacccacccaacgcacccatcaaaattctgacctcgcgctcgaaagttcaacctcaaccgaacctcccccaccccccatccgatcccccgacangacgccctccgcccccgtccttttcccagaaatcaactcacctcgtcgttttcccccccaacttcccgccacgcccgatctcgaacccgcccacactccaccccctctttccatcccgcaccaagatccgactgactcagcggaccccctcatgggctcccaccttttgcaccattcactgcctgcaccccccacccacccccttccatcttcacagctgttacccgcacctttaacgaacgaccccactgcgatcggcccggtgctcccctttgaagaactccacccacgcaggtaccctgaaaacaccgccactttcctcacgaggctccgttcactcccatcaaaccatcttccacaacccaccttgaattgtcttctctccgctgtctccgaccaaaccaaggtttccgaggagcacctctgggagtccctacagacaattctcccagacagccaactcagcaatgaagagaccaacactctcgggctttcaactgaacacctcactgcgttggcccacctttacaacttccaggcaaccgtttactccgatcgcggccccatcctcttcggcccctccgacaccatcaagaggatagacatcacccacaccaccggaccgccatcccacttttcacccggcaaaagactcctaggcagccaaccctccgctaagggccatccctccgacccactcatcagagccatgaagtctttcaaagtatccggcaactaccttcccttctctgaggcccacaaccatcccacctccatctcacacgccaagaacttgatttcaaacatgaagaatggtttcgacggcgtcctctccctcctcgacgtctccacgggccaacgaaccggacccncccccaaagaacggatcatccagatagaccactaccttgacaccaaccccggcaaaaccactcctgtggtgcatttcgctggcttcgctggctgtgggaagacatatccgatccaacagctcctcaaaaccaaactgttcaaagacttccgggtctcttgccctaccacagaactcagaaccgaatggaagacagcgatggaactccacggctcccagtcatggcgctttaacacttgggagtcttccattctcaagtcatccagaatcctggtcattgatgagatctacaaaatgccaagagggtacctcgacctttccatcctcgccgaccccgccctcgagctcgtcataattctcggcgatcctctncagggcgagtaccactcccaatcgaaagactcatccaaccaccgccttccctctgaaactctcaggctgctaccatacatcgacatgtactgctggtggagttaccgcattcctcaatgcatcgcccgactcttccaaattcacagcttcaatgcctggcaaggagttatcgggtccgtttccactccccatgatcaatcccccgtcctcaccaacagtcatgcctcatctcttaccttcaacagcctgggatatcgctcctgcacgatcagctctagccaaggcctcacattctgcgaccccgccataatcgtcctggacaactacaccaagtggctctcctcggctaacggcctcgtcgccctcactcgatccagatcaggcgtccaattcatgngcccctcttcctacgtcgggggaaccaacggctcttccgccatgttttccgacgccttcaacaacagcctcatcatcatggatcgctacttcccatccctgttcccgcaactcaagctcatcacctcccccctcacaactcgcggccccaaactcaacggggccacccccagcgcatcccccacccaccgttcgccaaacttccaccttcccccacacattccgctctcctatgatcgtgattttgttacggtgaacccaactctccccgaccaaggacccgaaacaagactcgacacccactttctcccaccgtctcggctccctctccatttcgatctcccaccggctatcaccccacccccggtttccacaagcgtcgacccgccacaagcgaaagctagccccgtctacccaggcgagttcttcgattctctggcggcgttcttcttaccagcacacgacccatcaacaagggaaatactccacaaagatcaatctagcaaccagttcccctggttcgaccgacccttcagcctgtcctgccagccctcaagtctgatttccgccaagcatgcacccaaccatgatccgacccttctaccggcctccatcaacaaacgcttgcgattcagacccagtgactcaccgcaccaaatcaccgcggacgacgtggtcctaggcctgcaactctttcactctctttgtcgcgcctactcacgtcaacccaacagcaccgttccattcaaccctgaacttttcgcagaatgcatctctctgaatgagtacgcacagctcagttccaaaacccaatccaccatagtggccaacgcttcacgctccgacccagactggcgacacaccaccgtcaagatcttcgcgaaagcccaacacaaagtcaacgacggctccatcttcggctcgtggaaagcctgccagaccctcgcactcatgcacgactacgtgattctggttcttggacccgtcaagaaataccagagaatcttcgacaacgctgaccggccacctaacatctactcacactgcggcaagacacccaaccaacttcgagattggtgccaggaacatctcactcattccacccccaaaatcgcaaacgactacaccgctttcgaccagtcccagcatggagaatccgtggtccttgaagccctcaaaatgaagagactgaacattccnagccatctgattcagctccacgtccacctcaagaccaacgtctccacccagttcggccccctcacatgcatgcgcctaaccggggaacccggaacttacgacgacaacactgactataacctcgcagtcatctactcccagtatgacgtcggttcctgccccatcatggtttctggcgacgactcactcatagaccacccccttcccactcgccacgactggccatccgttctcaaacgcctccacctccgcttcaaacttgaactcacctctcaccccctcttctgtggctactacgtcggtccagccggctgcatccgcaaccccctggcccttttctgcaagctcatgatcgccgtggacgacgacgccctcgacgaccgacgactcagctacctcaccgagttcaccaccggacacctccttggcgaatcactgtggcacctcctccctgaaacccatgttcagtatcagtcagcctgctttgacttcttctgcaggcggtgcccaagacacgagaaaatgctcctcgacgactccacacccgcactcagcctcctcgaacgaatcacttcttcgccgaggtggctcaccaaaaatgccatgtacctcctccctgccaagctacgactggccatcacctctctatctcaaacgcagtccttcccagaatccatcgaggtttcccacgctgagtctgaattgcttcactacgtccaatag

SEQ ID NO: 223 - protein, 415 aa, Citrus tristeza virus
VVRSQAIPPRKASLQENLLSYESRNYNFIKTERFVGPSEFGRAMAAAVIERCFKMEEMAKIRCDIISLTEANILKWLDKRTPCQIKAVHGELKLPFSVEEQISNFKLMVKRDAKVKLDDSSLSKHPAAQNIMFHKKFINAIFSPCFDEFKNRVLSSLNDNIVFFTEMTNAGLAEIIRRIIGDDDNLFVGEVDFSKFDKSQDLFIKEYERTLYSEFGFDTELLDVWMEGEYRARATTLDGQLSFSVDGQRRSGGSNTWIGNSLVTLGILSLYYDVSKFDLLLVSGDDSLIYSSEKISNFSSEICLETGFETKFMSPSVPYFCSKFVVQTGNKTCFVPDPYKLLVKLGAPQNKLTDVELFELFTSFKDMTQDFGDQVVLEKLKLLVEAKYGFASGTTMPALCAIHCVRSNFLSFERL

SEQ ID NO: 224 - protein, 446 aa, Beet yellows virus
TQVFESGADNVVIRDSAPVNKSTDHDPQRVSSIRSQAIPKRKPSLQENLYSYESRNYNFTVCERFSGPQEFGQAMAMVMLERSFDLEKVAKVRSDVIAITEKGVRTWMSKREPSQLRALSSDLQKPLNLEEEITTFKLMVKRDAKVKLDSSCLVKHPPAQNIMFHRKAVNAIFSPCFDEFKNRVITCTNSNIVFFTEMTNSTLASIAKEMLGSEHVYNVGEIDFSKFDKSQDAFIKSFERTLYSAFGFDEDLLDVWMQGEYTSNATTLDGQLSFSVDNQRKSGASNTWIGNSIETLGILSMFYYTNRFKALFVSGDDSLIFSESPIRNSADAMCTELGFETKFLTPSVPYFCSKFFVMTGHDVFFVPDPYKLLVKLGASKDEVDDEFLFEVFTSFRDLTKDLVDERVIELLTHLVHSKYGYESGDTYAALCAIHCIRSNFSSFKKL

SEQ ID NO: 225 - protein, 295 aa, Potato virus X
GTVRQSPDFDENKIMVFLKSQWVTKVEKLGLPKIKPGQTIAAFYQQTVMLFGTMARYMRWFRQAFQPKEVFINCETTPEDMSVWALNNWNFSRPSLANDYTAFDQSQDGAMLQFEVLKAKHHCIPEEIIQAYIDIKTNAQIFLGTLSIMRLTGEGPTFDANTECNIAYTHTKFDIPAGTAQVYAGDDSALDCVPEVKHSFHRLEDKLLLKSKPVITQQKKGSWPEFCGWLITPKGVMKDPIKLHVSLKLAEAKGELKKCQDSYEIDLSYAYDHKDSLHDLFDEKQCQAHTLTCRT

SEQ ID NO: 226 - protein, 70 aa, Potato virus A
GQLGVWNGSLKAELRPKEKVDLNKTRTFTAAPIETLLGGKVCVDDFNNMFYSLHLKAPWSVGMTKFYGTW

SEQ ID NO: 227 - protein, 236 aa, Potato virus Y
GLLGIWNGSLKAELRCKEKILANKTRTFTAAPLDTLLGGKVCVDDFNNQFYSKNIECCWTVGMTKFYGGWDKLLRRLPENWVYCDADGSQFDSSLTPYLINAVLTIRSTYMEDWDVGLQMLRNLYTEIVYTPISTPDGTIVKKFRGNNSGQPSTVVDNSLMVVLAMHYALIKECVEFEEIDSTCVFFVNGDDLLIAVNPEKESILDRMSQHFSDLGLNYDFSSRTRRKEELWFMSH

SEQ ID NO: 228 - protein, 236 aa, Pepper mottle virus
GKLGVWEWALKAELRSKEKIEANKTRTFTAAPIDTLLGGKVCVDDLNNQFYSKNIECCWTVGMTKFYGGWDKLLTALPAGWIYCDADGSQFDSSLTPYLINAVLTIRYAFMEDWDIGYKMLQNLYTEIIYTPISTPDGTIVKKFRGNNSGQPSTVVDNSLMVVLAMHYAFVREGIAFEEIDSICKFFVNGDDLLIAVNPERESLLDTLSNHFSDLGLNYDFSSRTRNKSELWFMSH

SEQ ID NO: 229 - protein, 235 aa, Bean yellow mosaic virus
GRMGVWNGSLKAELRPQEKVLANKTRSFTAAPIDTLLAGKVCVDDFNNKFYSLHLKIPSTVGITKFYGGWDRLLNSLPDGWVYCDADGSQFDSSLTPYLLNAVLEMRLRLMEEWDLGEQMLKNLYTEIVYTPILTPDGTVVKKFKGNNSGQPSTVVDNTLMVIMAVYYAAEKLGIKGNLEDTLVFFANGDDLLIAIKPECESYLDKFEGLFSELGLKYDFSSRTKNKGDLWFMSH

SEQ ID NO: 230 - protein, 188 aa, Wheat stripe mosaic virus
RVYRFQLKDIEKPFKDAIVDLGKAGQGILAWSKEAHVMFMLAFRVLNDLLLKSLKPWVVYDNSMSEEQFLDKVNAAMTVTPDCAVNSVIDATACDSGQNGFTQLIERQIYARLGASELLLDWYFSFREKYILQAEHVRAPMENVKTSGEPGTLLGNSILMAAILNALVRGSGPFVLVMKGDDGFKRQA

SEQ ID NO: 231 - protein, 401 aa, Rice yellow mottle virus
KQSLTSLILQAGRFNRTVCPPGLAQAVQSLQERYPKVPPRRCLRDEWRFDDIFDEVERILCETGEVNSASSPGVPLAGLANSNGEVRGLARDLVCLAVVERLNALASVDPRQHNWTPRELVEKGLCDPVRLFVKNEPHPRRKLLERRFRLISSVSLVDQLVERMLFGPQNNTEISTWWQWPSKPGMGLLTPEQIRLVWDDVFQKHQAHPAAEADISGFDWSVQDWELWSDLAIRINRGNFQGNLRRAAISRYYCFMNSVFQLSDGTLIQQELPGLMKSGSYCTSSTNSRIRCLMAELIGSPWCIAMGDDSVEGWIEGAQSKYAALGHTCKEYYPCKTRGRELLEFNFCSHLIRRGHAELTSWPKALFRFLSSKHEDFEDLWVELHTCGVWSRIERYLRGIG

SEQ ID NO: 232 - protein, 235 aa, Maize dwarf mosaic virus
GKLGIWNGSLKAEIRPIEKTEANKTRTFTAAPLETLLAGKVCVDDFNNQFYAHHLNGPWTVGITKFYGGWNRLLEKLPDGWIYCDADGSQLDSSLTPYLINAVLNIRLQFMEPWNIGEQMLKNLYTEIVFTPIATPDGSVIKKFKGNNSGQPSTVVGNTLMVIIAFNYTLLSCGVDLEKADDVCRMYANGDDLLLAVNPTHVDILNEFGKHFAALGLNFDFESRTRDKSELWFMS

SEQ ID NO: 233 - protein, 167 aa, Zucchini yellow mosaic virus
DFFKYNKPVTVNQLDHDKFLEAVDGVIRMMCDFEFNECRFITDPEEIYNSLNMKAAIGAQYRGKKKEYFEGLDDFDRERLLFQSCERLFNGYKGLWNGSLKAELRPLEKVRANKTRTFTAAPIDTLLGAKVCVDDFNNEFYSKNLKCPWTVGMTKFYGGWDRLMRSL

SEQ ID NO: 234 - protein, 236 aa, Watermelon mosaic virus
GEKGIWNGSLKAELRPIEKVQANKTRTFTAAPIDTLLGAKVCVDDFNNQFYSFNLKCPWTVGMTKFYGGWDKLMRSLPDGWTYCHADGSQFDSSLTPLLLNAVLSIRCCFMEDWWVGKEMLENLYAEIVYTPILAPDGTIFKKFRGNNSGQPSTVVDNTLMVVIAMYYSCCKQGWSEEDIEERLVFFANGDDIILAVRDEDVWLYDTLSASFAELGLNYNFDERTKKREELWFMSH

SEQ ID NO: 235 - protein, 235 aa, Sugarcane mosaic virus
GNLGIWNGSLKAEIRPIEKTTLNKTRTFTAAPLETLLGGKVCVDDFNNQFYSHHLQGPWTVGITKFYGGWNRLLEKLPDGWIYCDADGSQFDSSLTPYLINAVVKIRLQFMEEWDLGERMLQNLYTEIVYTPIATPDGSVIKKFKGNNSGQPSTVVDNTLMVILAFNYAMLSSGIREDEIDNCCKMFANGDDLLLAVHPDFEYILDGFQNHFSNLGLNFDFTSRTKEKSDLWFMS

SEQ ID NO: 236 - protein, 1616 aa, Tobacco mosaic virus
MAYTQTATTSALLDTVRGNNSLVNDLAKRRLYDTAVEEFNARDRRPKVNFSKVISEEQTLIATRAYPEFQITFYNTQNAVHSLAGGLRSLELEYLMMQIPYGSLTYDIGGNFASHLFKGRAYVHCCMPNLDVRDIMRHEGQKDSIELYLSRLERGGKTVPNFQKEAFDRYAEIPEDAVCHNTFQTMRHQPMQQSGRVYAIALHSIYDIPADEFGAALLRKNVHTCYAAFHFSENLLLEDSYVNLDEINACFSRDGDKLTFSFASESTLNYCHSYSNILKYVCKTYFPASNREVYMKEFLVTRVNTWFCKFSRIDTFLLYKGVAHKSVDSEQFYTAMEDAWHYKKTLAMCNSERILLEDSSSVNYWFPKMRDMVIVPLFDISLETSKRTRKEVLVSKDFVFTVLNHIRTYQAKALTYANVLSFVESIRSRVIINGVTARSEWDVDKSLLQSLSMTFYLHTKLAVLKDDLLISKFSLGSKTVCQHVWDEISLAFGNAFPSVKERLLNRKLIRVAGDALEIRVPDLYVTFHDRLVTEYKASVDMPALDIRKKMEETEVMYNALSELSVLRESDKFDVDVFSQMCQSLEVDPMTAAKVIVAVMSNESGLTLTFERPTEANVALALQDQEKASEGALVVTSREVEEPSMKGSMARGELQLAGLAGDHPESSYSKNEEIESLEQFHMATADSLIRKQMSSIVYTGPIKVQQMKNFIDSLVASLSAAVSNLVKILKDTAAIDLETRQKFGVLDVASRKWLIKPTAKSHAWGVVETHARKYHVALLEYDEQGVVTCDDWRRVAVSSESVVYSDMAKLRTLRRLLRNGEPHVSSAKVVLVDGVPGCGKTKEILSRVNFDEDLILVPGKQAAEMIRRRANSSGIIVATKDNVKTVDSFMMNFGKSTRCQFKRLFIDEGLMLHTGCVNFLVAMSLCEIAYVYGDTQQIPYINRVSGFPYPAHFAKLEVDEVETRRTTLRCPADVTHYLNRRYEGFVMSTSSVKKSVSQEMVGGAAVINPISKPLHGKILTFTQSDKEALLSRGYSDVHTVHEVQGETYSDVSLVRLTPTPVSIIAGDSPHVLVALSRHTCSLKYYTVVMDPLVSIIRDLEKLSSYLLDMYKVDAGTQXQLQIDSVFKGSNLFVAAPKTGDISDMQFYYDKCLPGNSTMMNNFDAVTMRLTDISLNVKDCILDMSKSVAAPKDQIKPLIPMVRTAAEMPRQTGLLENLVAMIKRNFNAPELSGIIDIENTASLVVDKFFDSYLLKEKRKPNKNVSLFSRESLNRWLEKQEQVTIGQLADFDFVDLPAVDQYRHMIKAQPKQKLDTSIQTEYPALQTIVYHSKKINAIFGPLFSELTRQLLDSVDSSRFLFFTRKTPAQIEDFFGDLDSHVPMDVLELDISKYDKSQNEFHCAVEYEIWRRLGFEDFLGEVWKQGHRKTTLKDYTAGIKTCIWYQRKSGDVTTFIGNTVIIAACLASMLPMEKIIKGAFCGDDSLLYFPKGCEFPDVQHSANLMWNFEAKLFKKQYGYFCGRYVIHHDRGCIVYYDPLKLISKLGAKHIKDWEHLEEFRRSLCDVAVSLNNCAYYTQLDDAVWEVHKTAPPGSFVYKSLVKYLSDKVLFRSLFIDGSSC

SEQ ID NO: 237 - protein, 1616 aa, Tomato mosaic virus
MAYTQTATSSALLETVRGNNTLVNDLAKRRLYDTAVDEFNARDRRPKVNFSKVVSEEQTLIATKAYPEFQITFYNTQNAVHSLAGGLRSLELEYLMMQIPYGSLTYDIGGNFASHLFKGRAYVHCCMPNLDVRDIMRHEGQKDSIELYLSRLERGNKHVPNFQKEAFDRYAEMPNEVVCHDTFQTCRHSQECYTGRVYAIALHSIYDIPADEFGAALLRKNVHVCYAAFHFSENLLLEDSHVNLDEINACFQRDGDRLTFSFASESTLNYSHSYSNILKYVCKTYFPASNREVYMKEFLVTRVNTWFCKFSRIDTFLLYKGVAHKGVDSEQFYKAMEDAWHYKKTLAMCNSERILLEDSSSVNYWFPKMRDMVIVPLFDISLETSKRTRKEVLVSKDFVYTVLNHIRTYQAKALTYSNVLSFVESIRSRVIINGVTARSEWDVDKSLLQSLSMTFFLHTKLAVLKDDLLISKFALGPKTVSQHVWDEISLAFGNAFPSIKERLINRKLIKITENALEIRVPDLYVTFHDRLVSEYKMSVDMPVLDIRKKMEETEEMYNALSELSVLKNSDKFDVDVFSQMCQSLEVDPMTAAKVIVAVMSNESGLTLTFEQPTEANVALALQDSEKASDGALVVTSRDVEEPSIKGSMARGELQLAGLSGDVPESSYTRSEEIESLEQFHMATASSLIHKQMCSIVYTGPLKVQQMKNFIDSLVASLSAAVSNLVKILKDTAAIDLETRQKFGVLDVASKRWLVKPSAKNHAWGVVETHARKYHVALLEHDEFGIITCDNWRRVAVSSESVVYSDMAKLRTLRRLLKDGEPHVSSAKVVLVDGVPGCGKTKEILSRVNFEEDLILVPGRQAAEMIRRRANASGIIVATKDNVRTVDSFLMNYGKGARCQFKRLFIDEGLMLHTGCVNFLVEMSLCDIAYVYGDTQQIPYINRVTGFPYPAHFAKLEVDEVETRRTTLRCPADVTHFLNQRYEGHVMCTSSEKKSVSQEMVSGAASINPVSKPLKGKILTFTQSDKEALLSRGYADVHTVHEVQGETYADVSLVRLTPTPVSIIARDSPHVLVSLSRHTKSLKYYTVVMDPLVSIIRDLERVSSYLLDMYKVDAGTQXQLQVDSVFKNFNLFVAAPKTGDISDMQFYYDKCLPGNSTLLNNYDAVTMKLTDISLNVKDCILDMSKSVAAPKDVKPTLIPMVRTAAEMPRQTGLLENLVAMIKRNFNSPELSGVVDIENTASLVVDKFFDSYLLKEKRKPNKNFSLFSRESLNRWIAKQEQVTIGQLADFDFVDLPAVDQYRHMIKAQPKQKLDLSIQTEYPALQTIVYHSKKINAIFGPLFSELTRQLLDSIDSSRFLFFTRKTPAQIEDFFGDLDSHVPMDVLELDVSKYDKSQNEFHCAVEYEIWRRLGLEDFLAEVWKQGHRKTTLKDYTAGIKTCLWYQRKSGDVTTFIGNTVIIASCLASMLPMEKLIKGAFCGDDSLLYFPKGCEYPDIQQAANLMWNFEAKLFKKQYGYFCGRYVIHHDRGCIVYYDPLKLISKLGAKHIKDWDHLEEFRRSLCDVAESLNNCAYYTQLDDAVGEVHKTAPPGSFVYKSLVKYLSDKVLFRSLFLDGSSC

SEQ ID NO: 238 - protein, 1601 aa, Turnip vein-clearing virus
MAQFQQTIDMQTLQAAAGRNSLVNDLASRRVYDNAVEELNARSRRPKVHFSKAVSTEQTLIATNAYPEFEISFTHTQSAVHSLAGGLRSLELEYLMMQVPFGSLTYDIGGNFSAHLFKGRDYVHCCMPNLDVRDIARHEGHKEAIYSYVNRLKRQQRPVPEYQRAAFNNYAENPHFVHCDKPFQQCELTTAYGTDTYAVALHSIYDIPVEEFGSALLRKNVKTCFAAFHFHENMLLDCDTVTLDEIGATFQKSGDNLSFFFHNESTLNYTHSFSNIIKYVCKTFFPASQRFVYHKEFLVTRVNTWYCKFTRVDTFTLFRGVYHNNVDCEEFYKAMDDAWHYKKTLAMLNAERTIFKDNAALNFWFPKVRDMVIVPLFDASITTGRMSRREIMVNKDFVYTVLNHIKTYQAKALTYANVLSFVESIRSRVIINGVTARSEWDTDKAILGPLAMTFFLITKLGHVQDEIILKKFQKFDRTTNELIWTSLCDALMGVIPSVKETLVRGGFVKVAEQALEIKVPELYCTFADRLVLQYKKAEEFQSCDLSKPLEESEKYYNALSELSVLENLDSFDLEAFKTLCQQKNVDPDMAAKVVVAIMKSELTLPFKKPTEEEISESLKPGEGSCAEHKEVLSLQNDAPFPCVKNLVEGSVPAYGMCPKGGGFDKLDVDIADFHLKSVDAVKKGTMMSAVYTGSIKVQQMKNYIDYLSASLAATVSNLCKVLRDVHGVDPESQEKSGVWDVRRGRWLLKPNAKSHAWGVAEDANHKLVIVLLNWDDGKPVCDETWFRVAVSSDSLIYSDMGKLKTLTSCSPNGEPPEPNAKVILVDGVPGCGKTKEIIEKVNFSEDLILVPGKEASKMIIRRANQAGVIRADKDNVRTVDSFLMHPSRRVFKRLFIDEGLMLHTGCVNFLLLLSQCDVAYVYGDTKQIPFICRVANFPYPAHFAKLVADEKEVRRVTLRCPADVTYFLNKKYDGAVMCTSAVERSVKAEVVRGKGALNPITLPLEGKILTFTQADKFELLEKGYKDVNTVHEVQGETYEKTAIVRLTSTPLEIISSASPHVLVALTRHTTCCKYYTVVLDPMVNVISEMEKLSNFLLDMYRVEAGVQYQLQIDAVFRDSNLFVQTPKSGDWRDMQFYYDALLPGNSTILNEFDAVTMNLRDISLNVKDCRIDFSKSVQLPKEQPIFLKPKIRTAAEMPRTAGLLENLVAMIKRNMNAPDLTGTIDIEDTASLVVEKFWDSYVDKEFSGTNEMTMTRESFSRWLSKQESSTVGQLADFNFVDLPAVDEYKHMIKSQPKQKLDLSIQDEYPALQTIVYHSKKINAIFGPMFSELTRMLLERIDSSKFLFYTRKTPAQIEDFFSDLDSTQAMEILELDISKYDKSQNEFHCAVEYKIWEKLGIDEWLAEVWKQGHRKTTLKDYTAGVKTCLWYQRKSGDVTTFIGNTIIIAACLSSMIPMDKVIKAAFCGDDSLIYIPKGLDLPDIQAGANLMWNFEAKLFRKKYGYFCGRYVIHHDRGAIVYYDPLKLISKLGCKHIRDVVHLEELRESLCDVASNLNNCAYFSQLDEAVAEVHKTAVGGSFAFCSIIKYLSDKRLFRDLFFV

SEQ ID NO: 239 - protein, 1612 aa, Pepper mild mottle virus
MAYTQQATNAALASTLRGNNPLVNDLANRRLYESAVEQCNAHDRRPKVNFLRSISEEQTLIATKAYPEFQITFYNTQNAVHSLAGGLRSLELEYLMMQIPYGSTTYDIGGNFAAHMFKGRDYVHCCMPNMDLRDVMRHNAQKDSIELYLSKLAQKKKVIPPYQKPCFDKYTDDPQSVVCSKPFQHCEGVSHCTDKVYAVALHSLYDIPADEFGAALLRRNVHVCYAAFHFSENLLLEDSYVSLDDIGAFFSREGDMLNFSFVAESTLNYTHSYSNVLKYVCKTYFPASSREVYMKEFLVTRVNTWFCKFSRLDTFVLYRGVYHRGVDKEQFYSAMEDAWHYKKTLAMMNSERILLEDSSSVNYWFPKMKDMVIVPLFDVSLQNEGKRLARKEVMVSKDFVYTVLNHIRTYQSKALTYANVLSFVESIRSRVIINGVTARSEWDVDKALLQSLSMTFFLQTKLAMLKDDLVVQKFQVHSKSLTEYVWDEITAAFHNCFPTIKERLINKKLITVSEKALEIKVPDLYVTFHDRLVKEYKSSVEMPVLDVKKSLEEAEVMYNALSEISILKDSDKFDVDVFSRMCNTLGVDPLVAAKVMVAVVSNESGLTLTFERPTEANVALALQPTITSKEEGSLKIVSSDVGESSIKEVVRKSEISMLGLTGNTVSDEFQRSTEIESLQQFHMVSTETIIRKQMHAMVYTGPLKVQQCKNYLDSLVASLSAAVSNLKKIIKDTAAIDLETKEKFGVYDVCLKKWLVKPLSKGHAWGVVMDSDYKCFVALLTYDGENIVCGETWRRVAVSSESLVYSDMGKIRAIRSVLKDGEPHISSAKVTLVDGVPGCGKTKEILSRVNFDEDLVLVPGKQAAEMIRRRANSSGLIVATKENVRTVDSFLMNYGRGPCQYKRLFLDEGLMLHPGCVNFLVGMSLCSEAFVYGDTQQIPYINRVATFPYPKHLSQLEVDAVETRRTTLRCPADITFFLNQKYEGQVMCTSSVTRSVSHEVIQGAAVMNPVSKPLKGKVITFTQSDKSLLLSRGYEDVHTVHEVQGETFEDVSLVRLTPTPVGIISKQSPHLLVSLSRHTRSIKYYTVVLDAVVSVLRDLECVSSYLLDMYKVDVSTQXQLQIESVYKGVNLFVAAPKTGDVSDMQYYYDKCLPGNSTILNEYDAVTMQIRENSLNVKDCVLDMSKSVPLPRESETTLKPVIRTAAEKPRKPGLLENLVAMIKRNFNSPELVGVVDIEDTASLVVDKFFDAYLIKEKKKPKNIPLLSRASLERWIEKQEKSTIGQLADFDFIDLPAVDQYRHMIKQQPKQRLDLSIQTEYPALQTIVYHSKKINALFGPVFSELTRQLLETIDSSRFMFYTRKTPTQIEEFFSDLDSNVPMDILELDISKYDKSQNEFHCAVEYEIWKRLGLDDFLAEVWKHGHRKTTLKDYTAGIKTCLWYQRKSGDVTTFIGNTIIIAACLSSMLPMERLIKGAFCGDDSILYFPKGTDFPDIQQGANLLWNFEAKLFRKRYGYFCGRYIIHHDRGCIVYYDPLKLISKLGAKHIKNREHLEEFRTSLCDVAGSLNNCAYYTHLNDAVGEVIKTAPLGSFVYRALVKYLCDKRLFQTLFLE

SEQ ID NO: 240 - protein, 775 aa, Turnip crinkle virus
MPLLHTLNTALAVGLLGARYYPEVQTFLGLPDYVGHMKNVVRSVFQGSGLVVVSSDTVGVRGTYSNRGQIGSSLGCILAVPDSGADIEIDLDRLVGTEEEATSCLVEAVGSTADVPRRRVRQKGRFAMHAVNAAKLHFCGVPKPTEANRLAVSKWLVQYCKERHVVDSHIRTIVNTALPRVFTPDAEDIQVVLDLHSVRAHDHRNALAEAGKVRKWWVNLAMHPMTGRSWSRAWRRLCRLPDDQAISFVRXGCLRELVGRETQISRGENPAMRVFPLANPPKVRRIFHICGMGNGLDFGVHNNSLNNLRRGLMERVFYVEDAQKQLKPAPQPIPGIFGKLSGIRRRLVRLAGNHTPVPREKYPSFYKGRRATIYQKALDSLHDRPVSRKDAELKTFVKAEKINFTAKKDPAPRVIQPRDPRYNIEVGKYLKPYEHHLYRAIDAMWGGPTVLKGYDVGELGNIMSNTWDKFRKTCAIGFDMKRFDQHVSVDALRWEHSVYNAGFNCPELAQLLTWQLTNKGVGRASDGFIKYQVDGCRMSGDVNTALGNCLLACSITKYLMKGIKCKLINNGDDCVLFFEADEVDRVRERLHHWIDFGFQCIAEEPQYELEKVEFCQMSPIFDGEGWVMVRNPRVSLSKDSYSTTQWANEKDAARWLAAIGECGLAIAGGVPVLQSYYSCLKRNFGPLAGDYKKKMQDVSFDSGFYRLSKNGMRGSKDVSQDARFSFYRGFGYTPDEQEALEEYYDNLELLCEWDPTGYKEELSDRWILNEFPTTL

SEQ ID NO: 241 - protein, 250 aa, Turnip crinkle virus
MPLLHTLNTALAVGLLGARYYPEVQTFLGLPDYVGHMKNVVRSVFQGSGLVVVSSDTVGVRGTYSNRGQIGSSLGCILAVPDSGADIEIDLDRLVGTEEEATSCLVEAVGSTADVPRRRVRQKGRFAMHAVNAAKLHFCGVPKPTEANRLAVSKWLVQYCKERHVVDSHIRTIVNTALPRVFTPDAEDIQVVLDLHSVRAHDHRNALAEAGKVRKWWVNLAMHPMTGRSWSRAWRRLCRLPDDQAISFVR

SEQ ID NO: 242 - protein, 818 aa, Tomato bushy stunt virus
METIKRMIWPKKEIFVGDFATGVNRTVPVNIFQLVCRVVLRYMRTGKIECDSDSMTKFIVELLKTDCAAKWEWFMKRRQRGDYIVPLSIASIPIIPLLSYATRVRAVSVKAFGNELSFNVRVPRPSVPKKGLLLRLAAGLALAPICALAVYATLPREKLSVFKLRTEARAHMEDEREATDCLVVEPARELKGKDGEDLLTGSRLTKVIASTGRPRRRPYAAKIAQVARAKVGYLKNSPENRLIYQRVMIEIMDKDCVRYVDRDVILPLAIGCCFVYPDGVEESAALWGSQESLGVKXGGLVRLPGVVTQINRDIPSDVLLPQEVLEVRTGPPNAKDRNIFMVAGCPSQARFLVHNHCLKNLKRGLVERVFCVERNGKLARTPQPTKGAFGRLSPFRKAVCEKVGVAHRLGYDGFLSYYSGAKLRTYTRAVESLHITPVSERDSHLTTFVKAEKISTSKGDPAPRVIQPRNPRYNVELGRYLRHMESKLMKAVDGVFGETTCIKGYTADEVGAIFRAKWDRFDKPVAIGLDASRFDQHCSVEALQYEHSFYRAMYPGNKLLGKLLEWQLHNKGKGYVPDGTITYRKEGCRMSGDINTSLGNYLLMCAMVHGYMRHLGINEFSLANCGDDCVLIVERRNLKQIQRTLPEYFLNLGYTMKVEQPVFQLEEVEFCQAHPVQFQGGWKMVRNVRTAMSKDVHCVNNIRDLATRRAWSNAQHHGGLALSAGIPVVETFYSRFKLYDVPRKHQRIDTVTNVHKWRGSGGSYVVTPESRASFWAAFGLTGDEQLALEDRLERWEMDLFGEEGVDAHEPSILDSAVA

SEQ ID NO: 243 - protein, 296 aa, Tomato bushy stunt virus
METIKRMIWPKKEIFVGDFATGVNRTVPVNIFQLVCRVVLRYMRTGKIECDSDSMTKFIVELLKTDCAAKWEWFMKRRQRGDYIVPLSIASIPIIPLLSYATRVRAVSVKAFGNELSFNVRVPRPSVPKKGLLLRLAAGLALAPICALAVYATLPREKLSVFKLRTEARAHMEDEREATDCLVVEPARELKGKDGEDLLTGSRLTKVIASTGRPRRRPYAAKIAQVARAKVGYLKNSPENRLIYQRVMIEIMDKDCVRYVDRDVILPLAIGCCFVYPDGVEESAALWGSQESLGVK

SEQ ID NO: 244 - protein, 2879 aa, Tomato spotted wilt orthotospovirus
MNIQKIQKLIENGTTLLLSIEDCVGSNHDLALDLHKRNSDEIPEDVIINNNAKNYETMRELIVKITADGEGLNKGMATVDVKKLGEMVSLFEQKYLETELARHDIFGELISRHLRIKPKQRSEVEIEHALREYLDDLNKKSCVNKLSDDEFERINKEYVATNATPDNYVIYKESKNSELCLIIYDWKISVDARTETKTMEKYYKNIWKSFKDIKVNGKPFLEDHPVFVSIVILKPIAGMPITVTSSRVLGKFEDSPSALHGERVKHARNAKLLNISYVGKIVGTTPTVVRNYYANTQKIKSEVRGILGDDFGSKDVFFSHWTSKYKERNPTEIAYSEDIERIINSLVTEEIPKEEIIHFLFGNFCFHIETMNDQHIADKFKGYQNSCINLKIEPKADLADLKDHLIQKQQIWESLYGKHLEKIMLRIREKKKKEKEIPDITTAFNQNATEYEEKYPNCFTNDLSETKTNFSMTWSPSFEKIELGSEVDYNNAIINKFRESFKSSSRIIYNSPYSSINNQTNKARDITNLVRLCLTELSCDTTKMEKQELEDEIDINTGSIKVERTKKSKEWSKQGSCLTRNKNEFCMKETGKENKTTYFKGLAVMNIGMSSKKRILKKEEIKERISKGLEYDTSERQADPNDDYSSIDMSSLTHRKKLIRHDNEDSLSWCERIKDSLFILHNGDIREEGKITSVYNNYAKNPECLYIQDSVLKAELETCKKINKLCNDLAIYHYSEDMMQFSKGLMVADRYMTKESFKILTTANTSMLLLAFKGDGMNTGGSGVPYIALHIVDEDMSDQFNICYTKEIYSYFRSGSNYIYIMRPQRLNQVRLLSLFKTPSKVPVCFAQFSKKANEMEKWLKNKDIEKVNVFSMTMTVKQILINIVFSSVMIGTVTKLSRMGIFDFMRYAGFLPLSDYSNIKEYIRDKFDPDITNVADIYFVNGIKKLLFRMEDLNLSTNAKPVVVDHENDIIGGITNLNIKCPITGSTLLTLEDLYNNVYLAIYMMPKSLHNHVHNLTSLLNVPAEWELKFRKELGFNIFEDIYPKKAMFDDKDLFSINGALNVKALSDYYLGNIDNVGLMRSEIENKEDFLSPCYKISTLKSSKKCSQSNIISTDEIIECLQNAKIQDIENWKGNNLAIIKGLIRTYNEERNRLVEFFEDNCVNSLYLVEKLKEIINSGLITAGKSVTSKFIRNNHPLTVETYLKTKLYYRNNVTVLKSKKVSEELYDLVKQFHNMMEIDLDSVMNLGKGTEGKKHTFLQMLEFVMSKAKNVTGSVDFLVSVFEKMQRTKTDREIYLMSMKVKMMLYFIEHTFKHVAQSDPSEAISISGDNKIRALSTLSLDTITSYNDILNKNSKKSRLAFLSADQSKWSASDLTYKYVLAIILNPILTTGEASLMIECILMYVKLKKVCIPTDIFLNLRKAQGTFGQNETAIGLLTKGLTTNTYPVSMNWLQGNLNYLSSVYHSCAMKAYHKTLECYKDCDFQTRWIVHSDDNATSLIASGEVDKMLTDFSSSSLPEMLFRSIEAHFKSFCITLNPKKSYASSSEVEFISERIVNGAIIPLYCRHLANCCTESSHISYFDDLMSLSIHVTMLLRKGCPNEVIPFAYGAVQVQALSIYSMLPGEVNDSIRIFKKLGVSLKSNEIPTNMGGWLTSPIEPLSILGPSSNDQIIYYNVIRDFLNKKSLEEVKDSVSSSSYLQMRFRELKEKYERGTLEEKDKKMIFLTNLFEKASVSEDSDVLTIGMKFQTMLTQIIKLPNFINENALNKMSSYKDFSKLYPNLKKNEDLYKSTKNLKIDEDAVLEEDELYEKIASSLEMESVHDIMIKNPETILIAPLNDRDFLLSQLFMYTSPSKRNQLSNQSTEKLALDRVLRSKARTFVDISSTVKMTYEENMEKKILEMLKFDLDSYCSFKTCVNLVIKDVNFSMLIPILDSAYPCESRKRDNYNFRWFQTEKWIPVVEGSPGLVVMHAVYGSNYIENLGLKNIPLTDDSINVLTSTFGTGLIIEDVKSLVKGKDSFETEAFSNSNECQRLVKACNYMIAAQNRLLAINTCFTRKSFPFYSKFNLGRGFISNTLALLSTIYSKEESYHFVSTASYKLDKTIRTVISAQQDMNLEKILDTAVYISDKLQSLFPTITREDIALILQNVCLDSKPIWQSLEDKMKRINNSTASGFTVSNVILSHNSELNTIQKQIVWMWNMGLCSHRTLDFVIRYIRRSDVRYVKTEEQDESRNYVSGTMYKIGIMTRSCYVQLIASDHDVAVSLRTPFEILNEREYLFDTYRESIEKLLQKFMFDKVNIIKSKQPQIVFLEPGDACIRMTTDNKMIVKVNATSRQIRLENVKLVVKIKYENVNSDVWDIIEGQKSLVLRLPEVGECFSDMYKTADSETETIKTIKNRLMTSLTFIEAFGNLSQQIKEIVYDDIRETMDEFLMNIRDTCLEGLENCKSVEEYDNYLDEDGFNDTVELFENLLRTHDNFEDEYSPLFSEIVDKAKQYTRDLEGFKEILLMLKYSLINDASGFKSYRATGMHAVELMAKKHIEIGEFNLLGMIQLIKACETCHNNDSILNLASLRNVLSRTYATFGRRIGLNHDLDLQNNLMEKSCDFKTLVLPDIKLSELSREILKENGFVISGENLKMDRSDEEFEGLASFNVLRLDEEEMYEGLIKEMKIKRKKKGFLFPANTLLLSELIKFLIGGIKGTSFDIETLLRNSFRPDIFSTDRLGRLSSSVPALRVYATVYMEYKNANCPLNEIADSLEGYLKLTKSKPKEHFLHGRVKKALIQLRDEQSRTKKLEVYKDIANFLSRHPLCLSEKTLYGRYTYSDINDYIMQTREIILSKISELDEVVETDEDNFLLSYLRGEEDAFDEDEIDEEEDTD

SEQ ID NO: 245 - protein, 2878 aa, Watermelon bud necrosis orthotospovirus
MNIQTINSFLDASGETTAYLQRIKDEIMLMSNVIEQGYSEGKGVIESGLSSIMSMNYILDKIEDMKSKYHQSSSSIDQREMETEIYLFLDKYKELELMRHDLFGVLAGRRLHFVPKHRSDVFMKDCLMSYIEFCSASVSISNKIDNLDSLKEKLIFQHLTPDNYTIYKETKGEKACLMIYDWKVSVDAVSEGKTSENYYTSVWKTFKDITIDEEPFLERHPIFITIVVLNPSGNMPIVATTCRVVQEFRNSPYKTFNDRKRAAEAAKLISVNSLGQLIGLGADCFRRFYSETQSFKNSLLSKVGKYMNRSSEVFFSHWSCEYRKTNLSNNQISQDIIDLINSLPNDVVGKEILVHFLFGNYLYFKETMSELHLKDRFEGYRSHCKMMRIRPLENEEKLKDYLDRNEHIFESLYETHLKKIKSDVLLRKSKEIEIESIERAFNINAEEYQKEYPGCFTNDLQETKTNFSICWSPMTEELKMNDLNYNNAIIQSFRDALSEQPKLIHHKSYGGAKVDTYFSTTLFNLVRACLVDLSTDTTGHSKATLEDVVDIKDGSIQVKRTEASQRWREIGNVKTRNGNEFTLSPQADTEARKNFFRGLNLMYVDMGKKKKIDIKNELKSKIQESMAQQKNENMDGPSGEYDVSKANIPHQTSLKGITHNKKLIRHDNPDVKYHCESMIESMYVLHGMDERKDKNSKINSVYNEYCSNPSSLFTKGNLIETEMTIAKNIHEVAKELSIYTYSEDMMQMAKGLMVADRFMKKTDFKILTCANTSMICLAFKGDGINTGKSGVPYITIHKVDKSIQPHFVSLYTKELIVSFKSENYFINIMRPQRLNQVRLLSLFKAPSKVPILFSQYSLLSTEIKKWLNQQSIDVFTCPENKIQYLQKILFSSVIIGTVTKLSRMGIFDFMRYARFLPLSDYSNIKEYIAEKFDPDITNVIDCFFVSGIKNLLLKMEGINLSNSIKPLTIDQENDMSGGISDLDIICPITGSTLKTIECLYNNVYLAIYMMPKSLHTHVHNLTTLLSVPAEWEIKFREKMGFMIGDEIKPKKEMFNDSGPFSINGVLNVKTLFDYYKKNITNVGACRSNIEEKEDFLSAPYKIKTLTSSKKCSKADIIKSTEIVAALKSSYGKQPDDIKGSDLYILKGVLKCFDEDRDSLTNFLEVEGLEESKYLHFFTNMMSGDNKILMKTNQDKFYYKSHPLTVETFMKVRYGYFKTTTVLKSKKVSEELYDLIKEFNKITEVDLEALEKLGRGLKGNRVTFIQLLEFILMKSRTNAGNTDFLVSIFEKMQRTKMDREIYLMSMKTKMMLYFIEHTYKHVAQSDPSEAISISGDYKIKNLASLSYDTITNYNTALQKNLECKMAFLSADQSKWSASDLTYKYILAVIMNPLLTTGEINLMCECIMMYVKLKRVCIPTDIFLNLKRGQTEYGSYGTALSVLTDNLETNTFPVSMNWLQGNLNYLSSVYHSCAMMGYEKAMKKMGNYDFTIRWMVHSDDNATSMVVRGDIKELLAEFNCTSLSELLFRSIQSHFKSYCITLNPKKSYASESEVEFISERIINGAVIPLYCRHLANCSTESSHNSYFGDLMSLSIHITMLLRKGCPNELIPFAYAAIQIQFLSIYSMLPGEENDISTIVKEIDFPLSKREIPICAGGWMYAPIELLSILGPSSNDQLIYYKIILDFFNLKDFSSLKKSVNSLGYIDLRINELFKRIKYQKITNADKKMICMVNLFKTSLMSEDCDSLNVGMKFQSMITQIIKLPSFVSEGSLLKNSSFQDFCKLFPNLKKNTDILNALKPVNLDERSLEELNESKFLSQIQLEELSRHMASHPESFLIAPMNDKDYILTNLYTYSSVSKRNQMLNQSTEKLALDRILRSKAKTFLDPNSKEMVSYKENMSMKMREIMSYAGNDFKIINTISSLMVRDMNFEMVVSLMENTVANASIPKANYNFRWFITEKVPSVIEGSPGLIVMSAVYGMDYLIELGLKKLPLTETSISILHDIFGNRKTFDDVKECIQNVKKQYKTEEFQNADVLKRYVLSINYMIQSQNKLLSINTCFSRKNFPFYSKYNLGKTFITNTLAIWSTIYSRLTNINFYTNLNFVIDRSSRLIISLQRDMNLEKLIDCCAYVSDRLQSLFPDMTVESIRQVLCRLNFNGVDLMKKMKSEIAEVKRAINNIKTSTHVTLSFRPQMIAMSKHAAWLYNFGYINEKEFKFVIDQIRQSEVHYIKTDEQDVRGYYVSGHTYKIGIKTQHNYGQLAMSNQDVSIHLHSPYEYKREDDGKIWDVHVRSVYKLLQKLLMDKQSVIKAFLNIRTELMPNQFCIHESSNKTLLILINDTTRPISLERIKFKGDIKYIPSSDFAWDMMSNQSKYRLRQAETGECYTELYKLIDNNDNLMNTILTNLKKSLEYGNEMENLIEQSIQGIDDADTIEYIQESVDQIHKLAIEGLETCQTSDEFENYLKRVDFQSTVDFHKDLLEQIVEEKYGSAERLDVAVEKLTKWTNSLSTFKDVCTMLKFSMVNDSKGIKTYKANGADFHSLSASEVMTSQGFDLFELLKLIKACEACHTSNSVLNLIAFKNIKNKTFIPGFKRHLPNTVHFDYEMKLNNEVMNKFYEYKTISLQDIKVSDRVKRVLETNGFSITGHNLKLEETNLELNPVEIIDDSSTYDQVAKQMRLTKKKSSYLIPANTLLLGELMKFLMLCIKGEEHDIMKLLRSHFAMQPVRENRLLCIQDAVMTCRISGYIQRHFLNDKKEIVLLGVADSLENFISLATPNYATQEPFKAEALIKKALAEVYDSGKYKILKNIRNYIVDDVEFLTEKCLYSNITNEEISNMIFNAVSKIDLELSNLKPKKRKKRLDLHDVFNGFLGSDATTSEQQ

SEQ ID NO: 246 - protein, 1844 aa, Turnip yellow mosaic virus
MAFQLALDALAPTTHRDPSLHPILESTVDSIRSSIQTYPWSIPKELLPLLNSYGIPTSGLGTSHHPHAAHKTIETFLLCTHWSFQATTPSSVMFMKPSKFNKLAQVNSNFRELKNYRLHPNDSTRYPFTSPDLPVFPTIFMHDALMYYHPSQIMDLFLRKPNLERLYASLVVPPEAHLSDQSFYPKLYTYTTTRHTLHYVPEGHEAGSYNQPSDAHSWLRINSIRLGNHHLSVTILESWGPVHSLLIQRGTPPPDPSLQAPPTLMXSDLFRSYQEPRLDVVSFRIPDAIELPQATFLQQPLRDRLVPRAVYNALFTYTRAVRTLRTSDPAAFVRMHSSKPDHDWVTSNAWDNLQTFALLNVPLRPNVVYHVLQSPIASLSLYLRQHWRRLTATAVPILSFLTLLQRFLPLPIPLAEVKSITAFRRELYRKKEPHHPLDVFHLQHRVRNYHSAISAVRPASPPHQKLPHALQKAALLLLRPISPLLTATPFFRSEQKSMLPNAELSWTLKRFALPWQASLVLLALSESSILLHKLFSPPTLQAQHDTYHRHLHPGSYSLQWERTPLSIPRTTAFLPFTPTTSTAPPDRSEASLPPAFASTFVPRPPPAASSPGAQPPTTTAAPPTPIEPTQRTHQNSDLALESSTSTEPPPPPIRSPDXTPSAPVLFPEINSPRRFPPQLPATPDLEPAHTPPPLSIPHQDPTDSADPLMGSHLLHHSLPAPPTHPLPSSQLLPAPLTNDPTAIGPVLPFEELHPRRYPENTATFLTRLRSLPSNHLPQPTLNCLLSAVSDQTKVSEEHLWESLQTILPDSQLSNEETNTLGLSTEHLTALAHLYNFQATVYSDRGPILFGPSDTIKRIDITHTTGPPSHFSPGKRLLGSQPSAKGHPSDPLIRAMKSFKVSGNYLPFSEAHNHPTSISHAKNLISNMKNGFDGVLSLLDVSTGQRTGPXPKERIIQIDHYLDTNPGKTTPVVHFAGFAGCGKTYPIQQLLKTKLFKDFRVSCPTTELRTEWKTAMELHGSQSWRFNTWESSILKSSRILVIDEIYKMPRGYLDLSILADPALELVIILGDPLQGEYHSQSKDSSNHRLPSETLRLLPYIDMYCWWSYRIPQCIARLFQIHSFNAWQGVIGSVSTPHDQSPVLTNSHASSLTFNSLGYRSCTISSSQGLTFCDPAIIVLDNYTKWLSSANGLVALTRSRSGVQFMXPSSYVGGTNGSSAMFSDAFNNSLIIMDRYFPSLFPQLKLITSPLTTRGPKLNGATPSASPTHRSPNFHLPPHIPLSYDRDFVTVNPTLPDQGPETRLDTHFLPPSRLPLHFDLPPAITPPPVSTSVDPPQAKASPVYPGEFFDSLAAFFLPAHDPSTREILHKDQSSNQFPWFDRPFSLSCQPSSLISAKHAPNHDPTLLPASINKRLRFRPSDSPHQITADDVVLGLQLFHSLCRAYSRQPNSTVPFNPELFAECISLNEYAQLSSKTQSTIVANASRSDPDWRHTTVKIFAKAQHKVNDGSIFGSWKACQTLALMHDYVILVLGPVKKYQRIFDNADRPPNIYSHCGKTPNQLRDWCQEHLTHSTPKIANDYTAFDQSQHGESVVLEALKMKRLNIPSHLIQLHVHLKTNVSTQFGPLTCMRLTGEPGTYDDNTDYNLAVIYSQYDVGSCPIMVSGDDSLIDHPLPTRHDWPSVLKRLHLRFKLELTSHPLFCGYYVGPAGCIRNPLALFCKLMIAVDDDALDDRRLSYLTEFTTGHLLGESLWHLLPETHVQYQSACFDFFCRRCPRHEKMLLDDSTPALSLLERITSSPRWLTKNAMYLLPAKLRLAITSLSQTQSFPESIEVSHAESELLHYVQ

SEQ ID NO: 247 - DNA, 3199 bp, Solanum lycopersicum
  source 1..3199: mol_type = genomic DNA
tcccaaaactcattatttaattttcttctttaacaaagttgacgagacaaaagcaaaatatatacaggaaaaatgggtgatccgttgattgaagaaattgatgttctggatgcacctttaccatattctgtagagacgatgcttgatagaatctgcaaggagcaggggcaaaaaccaccgtgtactggcattagaaggaggctgagctctattggtgaaaaagggtcattagaaatgctcaaaataatatcacgtcgtcctatcaagaagagtctctctgcttttcttgtttacatgattgatcgctacccggattgtctctcctcttcctctagccccttcaattgtctactcaaacgctcttcttcccctcgtctctttccatctccagagggtaaacgtttacaaggtgaaagttcttctaaatcaaagcttgagatgggcttattggcctgtgcaagccctcagaaagttgctcgccagttatcattttgcgaggagcctgaatctaactgtagaagaacctccccttatgtcagccaacagttgatgatcctcaatgaacttgaatttagaaaattgtttctggtactgagctacattggatgcaacaagttggaagatgttatatcccctcaaattgctgatgatattgtaagaaagaaaaatctttccatgactgattttgaatcagaaatttggaatgcttttggaaaagcatgttatgctgtgtcagatagatcaaagtacttagactggaattgcagaaagacacatatctactattgccacattaagcagaacggatactgttccttcaagggtccatacttgaacacattaaggactcacttacagagagccctgggagatgacaatgtactgattgtaaaatttgttgaagatacaagttgtgccaatataattctcgaggaaggcattcttgttggcttgagacgttaccgtttctttgtgtataaagatgataaagagaggaagaaaagtccagctatgatgaagacaaaaactgcttctttgaagtgctactttgttaggtttgagtccattggaacctgcaatgatggagaatcctatgtattttctaccaaaacaatcagtcaagcaaggtgtaaattcatgcatgtgcatatggtttctaatatggcaaaatatgcagccaggctttccttaattctatcaaagacgattaagcttcaaacagatcttgattctgtcaccattgaaagaattgaagatatactttgtcgggatgaaaatggttgtattattcaagatgaagacggcgaacctcgtatacatactgatggtactggtttcatatcagaagatttagctatgcattgtcccaaagatttttcaaaagcagaatatataaaagatgaaaattatgagaattttgttgatatcgtggaccttgatgacgtgaatgtagaaagaagagtgagtgtatctcgcaataggaaaccgcctttgttgatgcagtgccgtttgttcttcaatggttgtgctgtgaaggggacttttcttgtcaatagaaagattggatcacgaaaaattcatattagaccctcaatggtgaaggttgagatagacccaacaatttcaagtataccaacttttgactcattggagatagttgcaatcagtcatagaccaaataaggcatatctgtccaagaatttaatctctctgctgagctacggaggagtccataaagaatactttatggaacttttgggaagtgcgctggaagagacgaaacaagtatatttgaggaaacgtgcagctctaaaagttgctatcaactatagagaaatggatgatgaatgtctaacagcaaggatgatatcgtctgggatacctctcaatgaacctcatctccatgctcgcttgtctaggcttgcaaagattgaaagaactaagcttagaggaggaaagcttcctataagtgacagtttttatcttatgggaacagctgaccccactggtgtactggaaagcaatgaagtctgtgttattctagataatggccaagtatctgggcgtgttttggtctatagaaatcctggtcttcactttggagatgtacatgtgatgaaagcgcgatatgtggaagagcttgcagatgttgttggtgatgccaaatatggtatatttttttcaactaaaggcccgaggtcagctgctactgagattgcaaatggtgactttgatggtgatatgtattgggtttccataaaccgtaagttggtagattcttatacaacaagtagaccatggattcgcatgcattcaactcctaacgcagttagcaaaaaaccaagtgaattttcagctgatgaattggaatatgagctttttaggcaatttctggaagcaaagtctaaaggtgccaatatgtctctggcagctgatagctggctggcatttatggatcgtcttctgacgctgcgagatgataatgtggatgatatgcatagcttgaaaggcaagatgcttcacctgattgacatctactatgatgcattagatgcacctaaaagcgggaagaaggttagcatccctcattatctgaaggcaaacaagttcccccactatatggaaaaagggaactcctgcagctatcattcaacttctattctgggtcagatttatgatcatgtcgactcatatccagatgaagatttgtgtataacagaaatctctaaactgccttgctttgaagttgaaatccctcaaagatgcatgacattgtggagaggaagatatgaagagtacaaaaaggatatgacacgggccatgaactttgattgtgaactaagaatcacctcttgcaatgaagttataaagaagtacaagatgttgctatatggtgctgtggagtttgaacaaacagtaagaaagactgaagacattttcgacgaggcccttgcaatatatcatgtaacatatgataatgcaaggatcacatacagcatagagaaatgtggttttgcttggaaagtagctggttctgcgctttgcaggatccacgccatgtatcgcaaggaaaaagacttgcccattttgccatcggttttgcaggaaatactctagacgtattgtaacattgaagtgatcaataaatatctacttagcattctattctatgtgatgacgtccaaatttacttctcaaa

SEQ ID NO: 248 - DNA, 4902 bp, Arabidopsis thaliana
  source 1..4902: mol_type = genomic DNA
gttgttgctgtctcctctctcaatggctacctcctgcgactgaaacggtaaacctttattctctttagattcgtgtgtattcatcagtatatggtcatgttacaataatatattgcttattaactgatcaatctgttactgtcctgccctgcttactatagtagacagtttctgtggttttgtaatacttaggcatgtgttaactattattagaggacttacagtgagttaaggtgtcttcgtgtgtgtttctctcaaaatgatatatttgttactctgtacatatatatatatatgctcgtggaatcctgatgagaatttggttacagctttatcaatcctctaaatagttttcaacagtgcaaggttttgtgttcctctcttgaaaatatagtctctgaagtgttaacgagctctatatgactgtttgcagagttcaggcagcaatgtaaatgagctggagaatataagcaatgataggactgagtcaatagttcaagaacgtgaaggttctgacaactaagcaaactgcttcttcaatttggttcgataactgtagataaattgtgataaaatatcttttatttgatcaatcattacattattgtagagaatcctcagccaagagattggtagctagatagataaggttgacttggagtcaacttcttccttatagctttcttcatttaatatagtaaacgtttttaactcatttttttccagagaatctgtacccttggcgttcttgtactggttcatcgtagatgattctcgacgactagttgttatggctgaagcatttgtgtcgtttggacttgagaagctttgggatctcctgagtcgagaatcagagcgattgcagggaattgatgggcaacttgatggactaaagcgtcagctgagaagtttacagtcgttgttgaaagatgcagatgccaagaaacatggaagtgatagggtgaggaatttcttggaagatgtcaaagaccttgtttttgatgctgaggatataattgaatcctatgttctgaacaaacttagtggaaaaggaaaaggggtcaagaagcatgtgagacgacttgcttgcttcttgacggatcgccacaaggttgcttcagatatcgagggtatcactaagaggatctctgaagtgattggggaaatgcagagttttgggatacaacaaatcattgatggtggtcgttcgctgtctcttcaggaaagacaaagggtgcagagggagatccgacaaacgtatcctgacagttctgaaagcgatcttgtcggggtggagcagagtgttaaagaattggttggtcatttggtggagaatgatgttcatcaagtggtttctatagctgggatgggcggtattggtaaaaccactctggctagacaagtctttcatcatgacttagtccggcgtcactttgatggattcgcatgggtctgtgtttcccaacaatttacacagaaacatgtttggcagaggatcttgcaagaacttcagccacatgatggggatattttacagatggacgaatatgcacttcagcgtaaactctttcaattgttagaggccggtagatatttagttgtcctcgatgatgtatggaaaaaagaagactgggatgtaataaaagcagtgtttccacggaaaagaggtgagctcttatggtacatacatgaagcactttttcttcttaattcataaaagtgattgttaaaaaagaaatatatagaataattgccttttttattccctagcatgagaaacacaaatatttttgcaggttggaagatgctgcttacttctcgaaatgaaggtgttgggatacatgctgatccaacatgtttaacttttagagcaagcatccttaaccctgaagaaagttggaagctctgtgagagaatagtattccctaggagagatgaaactggtacatatcttattatataatgtttagtttctctaacttttaagaaaaatacatttacatatactaatttacatgtatatatttatattattttataaattttaattttccttaaccaaaaagtaatatttgtatacatattgctattttttccttactattagaacaactaactaaaaacgtatggtaatccatatgctaatttaggcatgtataaaaaaaaaagtcaatggtaatcttgattttgaccaaaaaataattaatttaattagcatgaacaatgagtgttgttaaggttcaaaaggacaatataattattaaacattaatttaattggataacaattaaaaaaattaactattaatcctagtacagtaagtcagtaattacgaatcttgaaaattggttttggtttttttcttcctattttttataggtttattcaaattagaaatatcgaattatctacttttatggtttattcatgattggtttgattaaaatttaacgtaataaaatcaactaaatttgaaagaaacatgtattgattaacccgtgattacacgattccttgtaataaagttcaaatagaatactaagaccaagaatctagtgtattattttaatttggcagctcacatgttgaaatgtattagcttgtgatattgtgcagaagtaaggcttgatgaagaaatggaagccatgggaaaggaaatggtcacacattgtggaggactaccattagctgttaaagcgttgggaggcttgttagctaataaacatactgttcctgagtggaaaagagtttttgacaatattggatctcaaatagtaggaggatcgtggttagatgacaacagtctcaattcggtttaccgaatattgtctctgagttatgaagatttgccaacgcatttaaagcattgcttccttaacctagcccatttccccgaagattccgagatatctacgtatagtttgttctattactgggctgcagaagggatttacgatggatcaaccatcgaagatagtggagaatactacctagaagagctagtgaggagaaatttggttattgcagacgacaactatttgagttggcaatctaaatattgtcaaatgcatgacatgatgagagaagtatgtttatctaaagccaaagaagagaacttcctacaaattatcatagaccctacttgcacctctaccatcaatgctcaatctcctagtagatctcgcagactcagcatacatagtggtaaagcctttcatatattgggacacaaaaacaagacaaaggtgagatctcttatagttccgagattcgaggaagactattggatacgatcagcttcagtcttccacaacttaacattgctcagggtgttggatctttcttgggtaaagtttgaaggagggaagttaccttgtagcattggagggctcatccacttgagatacttgagtttatacgaggctaaggtatctcatctaccttctactatgcggaacctaaagcttctgctctatttgaacttacgtgttgataccgaggaaccgattcacgtgccaaatgttttgaaagagatgatacagttgaggtacctttccctacctcttaaaatggatgataaaaccaagttggaattgggtgatctagtgaacctggagtacttgtatggtttctcaacgcaacacagtagtgtgacagacctcctccgtatgactaagctccggtatctcgctgtatctttgagcgaaaggtgcaattttgaaactctatcgtcatctctccgcgaattgcgaaacctcgagacgcttaatttccttttttcgctcgaaacatatatggttgattatatgggagagtttgttctggatcattttattcatctaaaacagttgggattggcagtacgtatgtcaaagattcctgatcaacatcaattccctccccaccttgtacacttatttctaatttattgcggcatggaagaggatccaatgccaattctagaaaagttgcttcatttgaagtcggttcgtttagcacgtaaggcattcctagggagcagaatggtgtgctcaaaaggcggatttcctcaattatgtgttatagaaatatctaaagaatcagagttggaagagtggatagtagaagaagggtcgatgccatgtcttcgtactttgactatagatgattgcaaaaagttgaaggaacttccagatggactcaagtacataacatccttaaaggaactgaagattgaaggaatgaagagggagtggaaggagaaactggtaccaggtggagaagattactacaaagtccaacacattcccgatgttcaatttatcaactgtgaccagtagcaggtaaaaaataaattgtatagtgttcactttgtttttttctgttgttgttggattcgtgtgaaagtcatgtggacagtctcaactattatacattgttctaacatcgatcatctttgaaataagatgcaggaaagaccaagaagcgagccaaattctcttatattgggagatatagacgctgcttcaacagagtcatctgctgatcaacaggtttttccgaagaatatctggtattgcttatgaagaatacagattctcaagtattaacgattatgtttccagtcttggagctctcgctttttcagtgcatcgttatgttgtgcggctcagaactatattatagaaacaatgcttatattgttgtttgtttttgatgtggatgcatggaacatgcttgagaactcttttacaaaatggagaaacgaaacttgtaaaatttggatattttatgtttgttgtaaaatttggatattttgtgtttgtgtaaaatttggatattatatgttttgctttctcgtttgtgatttaacacagttcgttttgtaagctttatttacagtttacaccatcaaatcttgtc

SEQ ID NO: 249 - DNA, 2931 bp, Arabidopsis thaliana
  source 1..2931: mol_type = genomic DNA
tttctcttcttttttttccctcacttctccaacaaactcgatttcccgatttcgtcgcctcttctcgtctctccgctctcctcgccgcgagtctgtttcgccgccgtctatctcccaattccggtacatcctaaaccatttccccttttaatccaacctgtgttgatttctaatcgcgattaatctcagttaggtttaattgcttgatctcagttgaaattagggcgtaatctcattactaaatgtagcaaaaatcgacaatatagtctcgtctctctgttatagcaatcaatttgtgagattctgaattttggcagaatcctaattctgaagtttggctaatatagaacctgtaattgtgttttttcatttatgagatgttttattaactttgttagtcacaaattgatttcatgtgtataatgttcattatttcgattttgttctcgtatgcgatattacgttcttggctgtgatatctgaagtaaagctgttgtaatctaagtttttcttctcttgattttaaacagtgaccgttgttgtttagtgaatcgatgatttacactgctatcgacaatttttacctatccgacgagcagctgaaggcttcaccttcgaggaaagatgggatagatgaaacaactgaaatctctcttagaatctatggatgtgatctcatccaagagggtggaatattgctcaaactgtatcctttttcttggtctaattattaagcaagactcaaatgttacgtagctgtgattttcttaacttagattgtttattttagaccacaggcagttatggctactgggcaggttctgtttcagcgattctattgcaagaagtctttggctaaatttgatgtcaaggtaaattattttgtttctttcttctagttttgtgtgtttatgaaagtatgataattctttaggagtgtatatactcctgcctatgaccataatgatttgatatgtagtttaatttttacagatagttgctgccagctgtgtatggcttgcatcaaaactggaagaaaaccctaaaaaagctagacaggtcatcatcgtattccacaggatggagtgtcgcagggagaacttgccattagaacatctggatatgtatgccaaggttagtttgcaattgcatttgtcatattgaatgttttttttcgtatattttgtttctactcatgggatagctttatttggaagtacttttatgggatctcatcttttttcctacttgttaaatatctgcagaagttctctgagttgaaagttgaattaagcagaactgagagacatatactgaaagagatgggttttgtttgtcatgttgaacatcctcacaagttcatatcaaactaccttgccacattagaaacacctccagaattgaggcaagaagcttggaatttggccaatgataggtaatctctattctcaaaatcctaatatggatattatttcatatgatttcctaatagttagctacacatcatagtgttgataggttttagagttgatgtttatcctgaagcttggcatttctcctgttctagtttgattttgagtatgtttgttatactttctcaatatctgataattcctttatgattttatcttaatctcatgatatgtctataatgcagtctgcgtacaaccctctgtgtaaggttcagaagtgaggttgtggcttgtggggtagtgtatgctgctgcccgtaggtttcaagtaccactccctgagaatccgccgtggtggaaagcatttgatgcagataaatctagtattgacgaagtgtgtagagttcttgctcatttatacagtcttccaaaggctcagtatatctctgtttgcaaggatgggaagccatttacattttctagcagatccgggaattctcaaggtcaatcagcgacaaaggtgaggtagatcgctttcttggttttgtaatttttgtgaaaacatgagattattgtccatattactgctattatagactcttaaagttgagtgcgtttcttacacagtagtaaacagagtttctaccaccacattgcatgttatatagtattgaaaaagggctgtctactttattatttcggcttgggaaaatctgcaatccaagtgcattttctatgtctgtaatcagagctaggtttgaagtgcttttaacactgttacaggatctgttgccgggagcaggcgaggctgttgatactaaatgtactgcaggatcagctaataacgacttgaaggatggaatggttactacaccacacgaaaaggctacagattccaagaaaagtggtaccgagtcaaactctcagccaattgtaggagactcaagctatgaaagaagtaaagtaggagatagagaaagagagagtgatagagagaaggaacgaggtagagagagggacaggggtaggtctcacagaggcagagattctgacagagacagtgatagggagagagacaaactcaaagatcgaagtcatcatcggtcaagagacagattgaaggattcaggtggacattcagataaatcaaggcatcattcttctcgggaccgtgactaccgcgactcatcgaaagaccgtcgtaggcaccattaagccaatcttcttgtcatctacatccccttgagcctacttgatgttaagacagtatagtgttgtattgtgttaagagtcaaaacccatgtgtacttaatcacatgctaagatcacgttggttcgacatataaaatcgagaaagtctgatatgtttctaatttggaattttgtgaaaagtgccttaaactttggaaaagtggttttttgacttttgacttgtgagttgttgtgaccgagcagagaggagaataatagtatccaaatctgacttgtggcacatgatggtaggcttaaagcacgttcaa

SEQ ID NO: 250 - DNA, 2681 bp, Brassica rapa
  source 1..2681: mol_type = genomic DNA
gagaacgattcgggaagtggcagttcaaatcttgtgttgcagctggtaatggcttttgcctcttcctcatcgagtattgttttaagcaaatgtgaattcgatgtcttttctttccatggtgcagacgtacgtaagaattttttgtcccacgtgcttatcgagctcaaatcaaagggcatagatgttttcattgacaacgatatccgccgatcgaaaagtataggaccttttctaattgacgcgatcaaggggagccgggtcgctatagtactgttatctgaagattatgcctcctcaacttggtgcttgaatgagcttgtggaaattatgaaatgtagaagggagttcggtcaaaccgttatgcccatcttttaccaggtcgacccatcggatgtaaagaaacaaacaggcgaattcggaaaggtgtttcagaaaatatgcaaggggaaaacagaggaaaagattcgtcgctggaaagaggcactcactgaagttgcgaacatcgctggtttccatagtagcaattggaagtctgaggccgaaatgatagagaaaattgcaaccaagatctccaacaaactaaatctgtcagtcccgtgttcgtattgcgacggcttagtaggaatagaaagtcacatgacagagatgcgaagcttgctttctctcgattgtgacgaagtgcggaaggttgggattctaggtatggcgggcatcggaaaaacaactatagctagatccctgtacaacaggcattgccaaaattttcagcgtttcgatggttgctgttttctttcaaacgagattgacgaattgaagcttcaaggtatcgatcagctccaacagaaactactgataaagttattggacgatgagacccttgaagtcggcgcctcgctcggagcacacaaagtactaaaggaccgcctgttaaataaaaagttgttcattgtgcttgataacgttgacaataaacaaatcagtctcctaataggggaggcgggtaagcagctgtatcgagatggcagccggattatcataacaacaagagacaaaaagttattggataaagtcgtagacggaacttacgtggttcctaggcttaacgggcgtgaagctctcgagcttttctgctcgaaagcatttggtaatcattatcccaccgaagagtttgtcgatctgtccaacgacttcgtatgctacgcaaaaggcttaccattggcgcttaagctcctaggaaaagggctgttaacacacgatattaattattggaagaaaaagttggaatttcttcaagtgaacccggacaaagagctccagaaggaactaaaatcatcgtacaaggctctggatgacgatcaaaaaagtgttttcttagacatcgcctgttttttccgcagcgagaaggcagattttgtctcttccatattgaaatcagacgatattgacgcgaaggatgtaatgcgagaacttgaggaaaaatgcctcgtgatgatctcgtatgaccggatagagatgcatgatctactgcacgctatgggtaaggaaattggcaaagagaagagtatcagaaaagccggagaaaggcgtcgcttaagcaattgtgagttgcttctcgacatactatctctgttattcgcaaactccgggtcagaatgcttgaagggtgattttaaagcgcttaatgagattaaggctatcaaaggcttccctgccgcattttcgatgctcggagacgatccctgtggggacggtgatttcctaaagtttcatggcagtcactgcagcactcagggagacaaccgagttgtcaccgatcatgaattccaagcgtctaaaatagtagggccatttccgattgctgtgacaaatctgttagacttgatgcggcttgatctccacaacaagctacctggtaaattcgaccccaaggagctgaaagatttatccttgagatggaatcatatcaaggacgttataccaccggaaattggcgagcttgaaaggctccgtcacctagatctgggatttaactcattcaaaggggagatccctaaggaattagccgcattgcccgagcttcgcgcgaaaaatctcgaagagctagacctggaaggtcgaataccagctgagtgtggctcgttacagaacttgcggcatcttgatgccggaaataaccacctcgtcgggaatactagagactgcattaggtttgatggtctattcaagggctttaaaatcaagagtctgaaaaacttaatattgagcggatgtattaaggcaaaagacttccatatcatatctgaagagattgtataccttcacctcgaaaagtttatctgcaatataccgttcgcgattgctcatatccacaaactaatatttctgaacttagatcataatcaattcttggggattcctgacgccttttataagcttaaattcctcaaggagatgtacatcgaaggtaaatccggcgtggagtcactacccacccacaaggttctggaagtctcggatgcagactttgcggtatggtaacgccctagacgatttctacctcctttgatctgttaaatctctcggactgacgaaagagaactttcttcaccactaatctatatttctccttaatcaaaaaaaaaaaaaaaaaaaaaaaaaaaaaaaaaaaaaaaaaaaaaaaa

SEQ ID NO: 251 - DNA, 5238 bp, Capsicum annuum
  source 1..5238: mol_type = genomic DNA
atggaaatcgtaactgctattttgagcccagtcgcagaacacttgatgatactgccagttgcgcgacagattggatatttgttttactataggcgcaacatcaggtctttggaaaatgaaaataagaagctggagggtatcagaagcggggtgcagcacagaaaggatgctgaatggagaaacttacaagtcatgccaccccatgtcgagaattggttaaaggatgttaatgaaactactgctgaggtggcggttttactacgacgtagagctgaggttgaaagaggttgcttctacggttggtgtccaaacttgaagtcacgtcactcgctgagcaggaaagctaagaaaattgaacaggctatgattggtcttcaagatgaaggcacacgttatgctccttcctcctgtccagcaccacttgcagttacagtgatacacagtgatgagtttgactctagaaaacagaaggaggaagaggtcatgacagctttgaaagatgaggggatcactattgttgggatatgtggtatgggtggtgttggtaaaacaacactggctgagaaagtaagagcaagggcaaaacaagaaaggttgtttgattatgttgttgtgctaactatcagtcaacaacaaccagacattaaaaaaatacagcgcgagatcgccgaaggagtcggtctatcattagagggggacgatttgttggagcgtggagatcggctgcgttcaaggttaatgcagaaggacagtcgcgtccttgtaattttggatgatgtttggaagaaggttgatctaaagagggttggaattcccagtggtagcgatcgcaactactggtgcaaagtgatattgacgacgcgtctccgagatgtttgtgacgatatggaggctaaaaagaaagtacatgttgaaatcttatgtgaaaatgaagcatggctcctttttaggcagaaagccggtaattcagctgatgatctctctcttcctgatatagcagaagccgttgccaaagaatgcaaggggctgccacttgcaattgttactgttgcaggagcactaaagggtaaaaccaagcgttcatgggaggatgcccttttagaattaaaaaaagcagcaccaagaaatattcgaggagtgcttgcagatgtgtatcaacctctgaagataagctataatcacttagggagtgatgaagccaaggatgcctttttgctttgttccttgtttgaggaagatagtaatatttggactgaagaattacttagatacggaatggggcttggcatcttttcggaactcgaaaatttagaatgtgcaagaaatagggtgtctaatctgttagaaacattgaaaaattgtttcttgttatcccaagttccaggcaaagattatgtcaaaatgcatgatgtggtccgggacatggctatacatattgcatctgagggtaaccatatttttttggtgagccacaatgtgaactcaaaagagttcccaagaaaagactcttacaagcaatacagtcatatgtcaattgttgcaaataaatttgatgcgcgtcccagaccaatatcttgcccacgattgaagcttctgatgttaaaactccgtttcgaagagggtttcaaattacaggatgatttttttgatggaatgagtgaactcagtgtcataaaactgagtggatatgatcgaaactccattctgccctttccatcatccattcagaggttgtcaaatctgagcacgctttggctgagtaatctaaggttggatgacgtgtccattattggggaacttgtcactttagaaattctcagcatcagaggttctgacttacaggagcttccagtggagatcggaaacttggccaatctaactatgttagagtattggaatactggttacagaaaccgtatgaggatttcaccaggggtcttatcaagactagttcgattggaggaactacatatggtgggagtagaagattgtagttactccaccttgagggagctggaatcgttatcgagattgactgcactgacattagatggatgttccaaagatgtgatttacagtaacttgggcctttcctccaagttgacacggtacgctcttaaaatgggtagacactacacgtttacttcattcatgcaaacttacaacaaggctatctatctagacgtcaccaagggcaccccattgggtgattggatccgcctcctgttgaggaatagcgaatgtgtaagttcaagcggaaaggggtccaagaatgtagtgttcgagttgcagaatgtgaaagatctcaggctgtctttttgtgattcattgaatatccactgtcagaataatattccattccccaaacttgaaaggctgaaagtaaatgggtgtgatcatctacggcatcttttttgtgtgtccttggcttgccctgatgaggggacctctcgaaggacacacatcagacctgacgtaatcaagttccccaatttatattacttggaactgggatttctgaaatgcttcacacactttttcagtgacaccgttgagggcattgagttccctctgttacggaaaatgcatttctggagtttacaaaagttccaaaatttctggcctagagtcaacaatgctatcaccgactcaaatcctctttttaatgaaaaggtttcttgtcccaacctggaattgctacgactctgtgaggccaacagcttaactgctctatgctctcaccaacttccaactgcctacttcagcaaacttgtaaccttgaatgtacttaggtgtggaaaactgagaaacttgatgtctccatcagtggccagaggtcttctgaatctccgaatattactattagaagactgtgaatcaatggaagaagtgatcacagaagaggaacaacaaggagatgaaatcatgtgtaatgaacccttatttccccaattggaagagctgggacttgaaaatctgccaaatctgaggcatttcattttgacaaagcaagctcttgaatttccattcctcagagaagtgcagattcgtaactgccctgaaacgaagatatttgtccaacagagatctgtcagtacatcaagtctcaaaagtgtgaacaatgatgatgagttgaaagttgttgatctcaacaaagcgatgtttaattctaaggtttcttgtcccaacctggaagtgctacgactctataaggctaacagcataagtgctctatgctctcaccaacttccaactgcctacttcagcaaacttaaggaactaggagtagggaattgtggaaaattgagacacttgatgtctccatcagtggccagaggtcttctgaatctccgaaaactatggataggagaatgccaatcaatggaagaagtgatcacagaagaggaacaacaaggagatgaaatcatgtgtaatgaacccttatttccccaattggaagagctgggacttgaaaatctgccaaatctgaggcatttcattttgacaaagcaagctcttgaatttccattcctcagagaagtgctgattcgtaactgccctgaaacgaagatatttgtccaacagagatctgtcagtacatcaagtctcaaaagtgtgaacaatgatgatgagttgaaagttgttgatctcaacaaagcgatgtttaattctaaggtttcttgtcccaacctggaagtgctactactctataaggctaacagcataagtgctctatgctctcaccaacttccaactgcctacttcagcaaacttaaggaactaggagtatggaattgtggaaaattgagacacttgatgtctccatcagtggccagaggtcttctgaatctccgaaaactatggatacgagaatgccaatcaatggaagaagtgatcacagaagaggaacaacaaggagatgaaatcatgtgtaatgaacccttatttccccaattggaagagctgggacttgaaaatctgccaaatctgaggcatttcattttgacaaagcaagctcttgaatttccattcctcagagaagtgctgattcgtaactgccctgaaacgaagatatttgtccaacagagatctgtcagtacatcaagtctcaaaagtgtgaacaatgatgatgagttgaaagttgttgatctcaacaaagcgatgtttaattctaaggtttcttgtcccaacctggaagtgctactactctataaggctaacagcataagtgctctatgctctcaccaacttccaactgcctacttcagcaaacttaaggaactaggagtatggaattgtggaaaattgagacacttgatgtctccatcagtggccagaggtcttctgaatctccgaaaactatggatacgagaatgccaatcaatggaagaagtgatcacagaagaggaacaacaaggagatgaaatcatgtgtaatgaacccttatttccccaattggaagagctgggacttgaaaatctgccaaatctgaggcatttcattttgacaaagcaagctcttgaatttccattcctcagagaagtgctgattcgtaactgccctgaaacgaagatatttgtccaacagagatctgtcagtacatcaagtctcaaaagtgtgaacaatgatgatgagttgaaagttgttgatctcaacaaagcgatgtttaattctaaggtttcttgtcccaacctggaaaagctatatatctattcggacataactgctctatactctcaccaacttccaactacctacttcagcaaacttgggacattgaaagtagaaaattgtggaaaattgagacacttgatatctccatcagtggccagaggtcttctgaatctccgaaaactacggataggagaatgccaatcaatggaagaagtgatcacagaagaggaacaacaaggagatgaaatcatgtgtaatgaacccttatttccccaattggaaaagctgaaacttgaaaatctgccaaagctgaggcatttcattttgacgaagcaagctcttgaatttccattcctcaaattagtggtgattcgtaaatgccctgaaatgaagatatttgtccaacatggatatgtgagtacaccaagtcttgaaattgtgaacgatgatgatgaggtaaaagtagatgatttgaacgaatggatacatcagaggttcaattctaaggaagaagatggaagtgaatctgaatcttctcagggagaagattggaatcgaatctga

SEQ ID NO: 252 - DNA, 682 bp, Arabidopsis thaliana
  source 1..682: mol_type = genomic DNA
tacatgtatatatattaatgttatgctattttcgttatgtaaccaaacaaaagagcttttgagttttggtcgtacaaaaaaaaagaaagggaaaatgaagataggacctgtagggaagcatgatgctagaagcactacaattgtaaactgggacgaaggatctcacgatggcttcatctctcagatttttctatctcatggcgtcgctggaattatgtctatccaattccagttcgtgatggacggaaaactcgttttatccgatcgtcacggtccattttccggcaacatgtttgacgttatagagctcaactatccgcatgagtacataactggaatcagtggagagtattacaagtatgaagccaacaatcctcacatgaggtctctcaaattcaataccaacactagcgagtacggtccttttggcacctccggttcgagcaacgacaaatttgcttttaaactcgggaaatctcctcagttcggcggtttccatgggacttatgatgcctcgggactacagtacattggtgtttatctccgcccaaaaacagttctacccaaaatagatacgggcaatgcagaggaaacagagtcaaaaattgtactgggctgaaagtgtttgtatacgactctattctgctgattgtacattcttaattatgaaaattcttctatg

SEQ ID NO: 253 - DNA, 3741 bp, Solanum peruvianum
  source 1..3741: mol_type = genomic DNA
atggctgaaaatgaaattgaggaaatgttagagcacctgagaaggatcaagagtggaggtgatctggattggctcgacatattgcgaattgaggaacttgaaatggtgctaagagtttttagaacctttacaaagtataatgatgttcttttgcctgattccttagtcgaactcacaaagagggccaaattgattggggaaatacttcaccggttgtttggtaggattccacataaatgtaaaactaaccttaatctagaaaggctagaatcacatttgttggaattctttcaaggtaatacggcaagtttaagtcacaattatgagttgaataattttgatctgtcgaaatatatggattgtctggaaaattttctaaatgatgtactgatgatgttcttgcaaaaggataggttcttccattccagagaacaacttgcaaaacatcgatcaataaaggaactgaaaattgttcaaaagaaaataagatttttgaaatacatatatgccccagagataaatggttatgtcgactatgagaagcaggaatgtttggagaatcgaattcagttcatgactaacactgtgggacaatattgtttggcagtattagattatgtcactgagggtaaacttaatgaagaaaatgacaactttagtaaacctccttacctattatcattgattgtgttagtggagctggaaatgaagaagatttttcatggtgaagtaaaggcttcaaagtttactcaatcaaaaactttcaaggacaagaaattaccaaaaggattttcacatcatctccacaatctgttgatgtatctcagaaacaaaaagctcgagaattttcctaataatatcgctgctcaaaatattgatgtggcaatagagttcttgttggttttccttgatgctgatgtgtcaaatcatgttattaatggtaactggttgaaagaggtcttgttaaaagttggagctatagcgggtgatattctatatgtaattcaaaagcttcttcctagatcaataaacaaagatgaaactagcaacataagtctttgctcaatacagatattggagaagactaaagatctgaaggcacaagttgagacgtactacaaatccttaaaatttactccatctcagttccccacctttggtggattgagctttctgaattctcttttaaggaaactgaatgagatgtcgacatctaagtccggattaggtttcctgatgaaacctcttttagggaatttggagaaagagctatcatctcttacatccattttagagaaggagctctcatccattttccgtgatgtcgtgcaccatgaacataacattcctaaagatcttcagaggcgtaccatcaatttgtcatatgaggctgaggttgctattgattctattcttgctcagtataatgcttttttgcatattttttgctcacttcctacaattgtaaaagagatcaagcaaattaatgcagaggtgactgagatgtggtcagcggacattcctcttaatcctcactatgtggctgctccattaaaacatctgccggatcgacatagcaatcttgtaactgatgaggaggtagtgggttttgagaataaagcagaagaactaattgattatctgattagaggtacaaatgagctagacgttgtcccaattgtaggcatgggaggacaagggaaaacgacaattgctagaaagttgtacaataatgacattattgtttctcgctttgatgttcgagcatggtgcatcatttctcaaacgtataatcggagagagttattacaagatattttcagtcaagttacaggttccgacgacaatggagctacggttgatgttcttgccgacatgttgaggagaaaattaatgggaaagagatatctcattgtattggatgatatgtgggattgtatggtatgggatgacttaaggctttcttttccagatgatggaattagaagcagaatagtcgtaacaactcgacttgaagaagtgggtaagcaagtcaagtaccatactgatccttattctcttccattcctcacaacagaagagagttgccaattgttgcagaaaaaagtgtttcaaaaggaagattgcccgcctgaactacaagatgtgagtcaagcagtagcagaaaaatgcaaaggactgcccctagtggttgtcttggtagctggaataatcaaaaaaaggaaaatggaagaatcttggtggaatgaggtgaaagatgctttatttgactatcttgacagtgagttcgaagaatacagtctggcaactatgcagttgagttttgataacttaccccactgtttaaagccttgtcttctttatatgggaatgttttcggaggacgcaagaattccagcatctacattgataagtttatggattgctgaaggattcgtggagaacactgaatctgggagattaatggaagaggaagctgaaggttacttgatggatctcattagcagtaacttggtaatgctttcaaagagaacttataagggtagagtcaaatactgtcaggttcatgatgttgtgcatcacttttgcttggaaaagagtagagaagcaaagtttatgcttgcagtgaagggtcaatatatccattttcaaccttcggattggaagggaactcgagtgagcttcagttttagtgaagagctttccaagtttgcatctctggtctccaaaacacagaagcctttccatcaacacttgaggtcattgataacgaccaatcgagcaaaatctattaatgatattttctcctgtcagattagtgaattgcgacttcttaaagtcttggatttgagttcttatattgtggagtttttgtcgttagctacattcaaaccactaaatcagctgaagtacctcgcagttcaggcttttgaattctattttgatccaggatcacatcttccccatatagaaactttcattgtaatgaatcttccttattatgatatattgttaccagtgtctttttgggaaatgaaaaaattaaggcatgctcattttggtaaggctgaatttgacaagcaggggctctctgaaggatcctctaaattggaaaatttgaggatattaaagaatattgttggatttgatagggtggatgtgttatcaaggaggtgtcctaatcttcaacaacttcaaatcacatattttgggaataatgaagagcctttttgtcccaaattggagaatcttacccagcttcaacaacttcaactttcctttgcgcgtccccgcactctatccgggttacagttgccttcaaatttaaataagttggtacttgaaggaattcatataggatgtgttattcccttcattgcgggactaccaagcctggaatatctccagttacatgatgtgtgttttcctcaatcagaagagtggtgccttggagatatcacgttccataaacttaagttgttgaaactggtaaagttaaatatatcaaggtgggatgtctcagaggaatcatttccgttgcttgaaacactcgttataaagaagtgcattgacctagaggagattccacttagctttgctgatattccaacattggaacagattaaattgattgggtcctggaaagtatctctggaggattcagctgtgagaatgaaggaagaaatcaaagacactgaaggatgtgatcgtttacacctcgtcaaacaacgctcagattga

SEQ ID NO: 254 - DNA, 7158 bp, Nicotiana glutinosa
  source 1..7158: mol_type = genomic DNA
attttttcacatacagtttcttactcttttcagagaattaacgttgagtccatggcatcttcttcttcttcttctagatggagctatgatgttttcttaagttttagaggcgaagatactcgaaaaacgtttacaagtcacttatacgaagtcttgaatgataagggaataaaaacctttcaagatgataaaaggctagagtacggcgcaaccatcccaggtgaactctgtaaagctatagaagagtctcaatttgccattgttgttttctcagagaattatgcaacatcaaggtggtgtttgaatgaactagtgaagatcatggaatgcaaaactcgatttaagcaaactgttataccgatattctatgatgtggatccatcacatgttcggaaccaaaaggagagctttgcaaaagcctttgaagaacatgaaacaaagtataaggatgatgttgagggaatacaaagatggaggattgctttaaatgaagcggccaatctcaaaggctcctgtgataatcgtgacaagtgagttaaaaacatataagctgaatactttgcattcaaatgagttaaacataatcttaaataaatttttcaattttttggaataaattgatagttgattatatatgtttctatcagttaattacaaactcaataacattattacgtagataaaatttttattagttcttcaaagagtttgatttatgtgcacactctttgtatatatcacaatctttttacttttgtaggactgatgcagactgtattcgacagattgttgaccaaatctcatccaaattatgcaagatttctttatcttatttgcaaaacattgttggaatagatactcatttagagaaaatagaatccttactagagataggaatcaatggtgttcggattatggggatctggggaatggggggagtcggtaaaacaacaatagcaagagctatatttgatactcttttaggaagaatggatagttcctatcaatttgatggtgcttgtttccttaaggatattaaagaaaacaaacgtggaatgcattctttgcaaaatgcccttctctctgaacttttaagggaaaaagctaattacaataatgaggaggatggaaagcaccaaatggctagtagacttcgttcgaagaaggtcctaattgtgcttgatgatatagataataaagatcattatttggagtatttagcaggtgatcttgattggtttggtaatggtagtagaattattataacaactagagacaagcatttgatagagaagaatgatataatatatgaggtgactgcactacccgatcatgaatccattcaattgttcaaacaacatgctttcggaaaagaagttccaaatgagaattttgagaagctttcattagaggtagtaaattatgctaaaggccttcctttagccctcaaagtgtggggttctttgctgcataacctacgattaactgaatggaaaagtgctatagagcacatgaaaaataactcttattctggaattattgataagctcaaaataagttatgatggattagagcccaaacaacaagagatgtttttagatatagcatgcttcttgcgaggggaagaaaaagattacatcctacaaatccttgagagttgtcatattggagctgaatacgggttacgtattttaattgacaaatctcttgtgttcatctctgaatataatcaggttcaaatgcatgacttaatacaggatatgggtaaatatatagtgaattttcaaaaagatcccggagaacgtagcagattatggctcgccaaggaagtcgaagaagtgatgagcaacaacacagtaagtaagctaaataatgcaataatatttaatttctaattttatattctaaagacacatagggcagtcaattccagttatttgttcctcttgcttcatagtcttgacggtacatcattttagttgtttactttagttagtaggagatataaaagtaatattaattacctcattagtaaaaaaaaacattaattgcctaatttgtttagtagccgctttaatttacgttccctaattcgttttttcttatattttttagggatggattagtctagtagccacttaatctgtttgatccaatgtctttctttggattaacttgaaaattttatgacattatatataataactcaatcattcattcactttaccattattattttttatataaagttacaatttattggtactgtttcagttacaattactttccaacatggaaaacttataaactggactccaataaacttataagaaaaatgtaataatagaaaataaaattatataattaattacaaaaaagtatttttctgaagtaacatcagtatttcttaaaaagaatccaattaacattgtatcttaaactttggtattgtaaggcgtgagaaagtagtggccttatttcaatttgacgtgaagaatagaatgccttttaacgacataagggaagggggcaagaataagtttctattcagccgggctcgaagcagaaggtagaacgtaatatcttttgttggttcagctcatcaagctattacaaaagagtccgctcatattaacaaacggagtttatacgacatttgaaattatactttgtagactaatgatcttcttgttaccaggggaccatggcaatggaagcaatttgggtttcttcttattctagtactctacgctttagcaatcaggccgtgaaaaatatgaaaaggcttagggtatttaacatggggaggtcgtcgacacattatgccatcgattatctgcccaacaacttgcgttgttttgtttgcactaactatccttgggagtcatttccatctacatttgaactcaaaatgcttgttcacctccaactccgacacaattctctgcgtcatttatggacagaaacaaaggtacaatagcttgaattctattttgttgtcatttatttttctctctaactatctttgtcctttaatttggtgataatgaacaaatattattgttttttgttatgaaacaataaaagaagaagaacaatattgcagagaaagagggagatggaattcttattgaattttggggcgatttacaatggggtaagacccctctatttacaggggaaaaataacttagcctcaaaataaagctctttaaaagatagacattcactctaaatagaattctattataacacttttggcgtacttccttttttggctagaattatgatacatgtctttaaatgaacagaagttgcttttgtaatttatcaggacttatgttgaaacttatgaaaattgttattgtttatgttgtctaatactaaatataaaatacaataatattttatcgtaattttttaaaaatttgtcaaataatgcaaatgaaaaattaaattttttggtcctttaaaaatttgagaatgaaaaagtacgagttatacttcctaaaagtttgatagtgaataatatgtaaaatttaaagaatgactaatattggactaatactttaaaacaaataacttaatatacaaattatagcgagacattttcattcgttgtactgaatgcaagaaagaaaggaaaaaaaaactcatttataatatagtttgtcttctactattttaccttattgcttcaaatttgtattttatcgattttgctatatcttatgatttttttcacggtcaatattcttcttacaagaataaattttatatacctcaagtgttttgtcaatttgataaataatttttcttatatgatgaacttgtaaaataatagaattggattcttttgctaattagttaattcaacgacttaattatttattctcaacattaaaggaaataatttagtttttattaattcaaactcttagtatttgctcattctaattttcagtccaataagaattcaattttcaaatagtaagaaaagtcatatattttgaattttatgttttccgaagcattgtttgtttgtttaactctacgggagttttctaactcacattttgtataataaaattttttgagtagtagttcagtacaactctaatattaatgggctttaaataaggaaatatatattacgtaaaaatttaaatcattttaaagttctttcctaccaagtaaataagggaaaatttaataacaaaaatttagttgattttaaaatcctaaatattagaaaattaacttaaaatataatttcgtctagtgtaaaatttatttttaaagggtaaaaaagacgaacgacattaagagcctttgtaattttaatatagtataaatataaataatttacctttattcagtttcttaacaagtaattttccatatataaaaaataaatttctatattcacacaaaaataatgtgttggccctcgtaattcaaatactatcattcatttcttgtcgagggagtagtaaatacttttaggaaagttagcaataagtaatcaagaaatcaagaaaacagaggtcatttgatgcccacaaatacaaatgaaaaaacaaaacaaatgttacgaaacaataaaagaacaagaatagcctcaaagtaaaactctctgatagacatttactctaaatagaattctatttataacaatcaaaaagtttctacatttatagatagctccactagccaaatattttattattggaatcagcaaaataggttgtttctttttttattctcattctgtctgtgttctaaacagcatttgccgtctctacggaggatagatctcagctggtctaaaagattgacgcgaacaccagatttcacggggatgccaaatttggagtatgtgaatttgtatcaatgtagtaatcttgaagaagttcaccattccctgggatgttgcagcaaagtcattggtttatatttgaatgattgtaaaagccttaagaggtttccatgtgttaacgtggaatctcttgaatatctgggtctaagaagttgcgatagtttagagaaattgccagaaatctacgggagaatgaagccggagatacagattcacatgcaaggctctgggataagggaactaccatcatctatttttcagtacaaaactcatgttaccaagctattgttgtggaatatgaaaaaccttgtagctcttccaagcagcatatgtaggttgaaaagtttggttagtctgagtgtgtcgggttgctcaaaacttgaaagcttgccagaagagataggggatttagacaacttacgggtgtttgatgccagtgatactctaattttacgacctccgtcttccatcatacgcttgaacaaacttataatcttgatgtttcgaggcttcaaagatggagtgcactttgagttccctcctgtggctgaaggattacactcattggaatatctgaatctcagttactgcaatctaatagatggaggacttccggaagagattggatccttatcctctttgaaaaagttggatctcagtagaaataattttgagcatttgccttcaagtatagcccaacttggtgctcttcaatccttagacttaaaagattgccagaggcttacacagctaccagaacttcccccagaattaaatgaattgcatgtagattgtcatatggctctgaaatttatccattatttagtaacaaagagaaagaaactacatagagtgaaacttgatgatgcacacaatgatactatgtacaatttgtttgcatataccatgtttcagaatatctcttccatgaggcatgacatctctgcttcagattccttgtcactaacagtatttaccggtcaaccgtatcctgaaaagatcccgagttggttccaccatcagggttgggatagtagtgtatcagtcaatttgcctgaaaattggtatatacctgataaattcttgggatttgctgtatgttactctcgtagcttaattgacacaacagctcacttgattcccgtatgtgatgacaagatgtcgcgcatgacccagaaacttgccttatcagaatgtgatacagaatcatccaactattcagaatgggatatacattttttctttgtaccttttgctggcttatgggatacatctaaggcaaatggaaaaacaccaaatgattatgggattattaggctatctttttctggagaagagaagatgtatggacttcgtttgttgtataaagaaggaccagaggttaatgccttgttacaaatgagggaaaatagcaatgaaccaacagaacattccactgggataaggaggactcaatataacaacagaacttccttttatgtaagtctctacttctattagctacaaagtcttcttccaaaatcaatactccatccgttccagtttatgtgaacctattttttgttcgtccattctaaaaagaatgacccctttctaaatttggaaataattttggttaaacttataattctaccattaacgagaagcttttataaccacacaaatattctggggccctttttgaattgtttaggaccataaattccaaaagtcctcattttttcttaaactccgtgcccaatcaaacaagttcacgtaaattggaacggagggaatatattttttcttctcattcttttcccctatttacaggagctcatcaatgggtgatgtacatatcaacaacgagttttaaaggattccaacaagtataactttttatgctcaaatcagctccttgtattgtggagaaagctgagtacgagatgaagttgacgtccgttatcctttatgatctctctgttctttgtgttaacttgcctacttcatcagatgaataacagaagcccgttcctctcattctcaacactgtttgcacgtctgttgttacttgttaaaatggatcttgataaagtaataacatctctatattacttataagtggttttaacaagttcactcttttgcttttgcagttcaaatgggaacacaatgtatattgagaactagaacaatgacactgcatatatatatatatatgtatgtatgtaattctcgtcttttggactagaataccttgtttcattatgaaatgaattaacatcttcgcctttgctgac

SEQ ID NO: 255 - DNA, 9837 bp, Solanum lycopersicum
  source 1..9837: mol_type = genomic DNA
ggatccttctcatttttagattacaagttctatactcttgttctttatagaatatttcaattgtgaattgtaatagttgaaataagttctaagtttaataaaatttgaggaaataattcatcaattaacactcatattttctttctactattttcatcacatacatacttcaaagatatatcattttataatatcaattctaattagcatgagaacacgtgcaagagacacgtgttcaacaactaatattactaaaagtgggaacaaaaaaaattaaaatatcaaaatcatattttatttagttatttaaaggtaattttatttttattcatgatatagtgatgttcatattataatactattattgattactttcttttagggggtaaattgtatggcatggaaaaaaaatattttcagagatgatgattcttttatcattagaaaacttatattagattatttatacttgtatactcgggttagaagttttgtgttctatgagtttctttaatcatgtttgtaattatttcaaagtattgatatatttttataattttgttttactatgttattatataatattgtagagaaaatgatcaaatgccccctcaacgtataactggatttccaactacacacttaaactttacgagagtcctatcacccccctgaactatttaaaaatgaaataattatacccttaaaaaagtcataaccagatctattttcacgtgtttgacacgacatcaaattattattatttttagggataatgcccaagtaccccctcaacctatgcccgaaatttcagagacacacttatactatactaaggtcctattacccccctgaacttattttattaataattttttactcctttttagcctacgtggcactatcttgggggcccaacgatggttgactttttttttcaaactagtgccacgtaagctaaaaaggggtaaaaaaaattacttataaaataagttcaggggggtaataggaccttagtatagtataagtgtgtctctgggatttcgggcataggttgagagggtacttgtgcattttctcttatttttaccatcactagaacaccataagtccattattgggtctttgaggaagaaaagtgaataataatttatagctcgttcagagatatttgaattttgctcatttgatacctaaaattaactttaaaaaagtgagggggggaggtggggggttagaagacgaatattgtcattaatgatggtcaccgaagataaacaatgctctcaaggaagatgaggaggagcaacctatgatgtctgccacatcatcttctatggcgacaacaatttcaaatagggagagagattctacgatatttgatggattaactagattaatagctaaaattttgtagatataattgattgattgagatttgatattctattagtaaaaaaaatatttttttggttggtccaatcggagtcaaagtaaaacccatattgattttctcaaattaggtccaaagtatcctgaggtaatataaatatatgtaaatttatctcaattgattttggatgattggtaatcaagagttttatatgagttcgaaaatttattttgaatcagaaatagtcaatccggtgaagatattgatggcaacaagacttagaggtggtgaaagattgagagatttgttaataaggaaagggccaaaaataccctctaactttaatttattgattgactttatcccatccgttaaaatgaagttatttataccctcgcctttaacaaacttgtcatttctaccctccaaattaacggttgccctaaattgaccccaaatcccaatttcaatttaaattacccatttgaaattgatttcctcttttaaaccggacccaataaacttaataacattggtgaaacttcaaactttcttcccaattttgtcaaaaacagagattttacacaataatatacaactcaatatacataaaccaacaaaaatgaaaatgcaccattagaggaattgaatagctattgccatggtacaaatcgtttctacatagatgataccaaataaatgagagaacaccattacattatttggtgctgttttcttgtactccgacaacccacaacccttgagcgatcccaatggtgacaaacacaactgaagaacttcttgcagatgcacattatctccgggcaacgatgacgatcaaaaagcaagaggacgaaacccttctgcctcaatgtttcacctcttcttctgcaccatattttcttcgatattccctactttcaatcttttaatttttcgccattgatttgaaccaatagcccccaatatttcaattttttgatcttggaaaaccatgttggtaattggtagaagacagcatcgttcaaatcgatttgtgtcgattcgttggaatcagaggaaaagtagtaagaatggaacgtaccagttcgtcggaaccggaggaatattaataaaagagaagaaagtgaacgaagagagttatccttaattgagatgattctggtaacttttttgtgacgattctggtaacctttgatggagaaataagaagtcattgttcaagttattgagagagaaagaggagatgctttgttgttatttgtttactataatgggtcaggttggattgagtttgggtaataaatgatatggcaattttatttgaaattgggatgatttttattgatttgaggctttccctctaaagaagggtacatatgacaagtttttttcaacggtaaggatataaataacttttttttaatggtaagggtaaagttaaccagtaaatcaaagttgatgaagaagaaagattacaaataagaaaaataaataattgaaaatgcatatatttattgaaagagatattaaaaataaagttttagtaatagattttgatgttcactctccaaagagagtgaaatacactaactatgccagctaagcattcagggaggtaattatttcagttttaaatagtacagagggtaataggactcccgtgaagtttaattgtgtagttgaaaatccaaaaatacattgaggtgacattcaatcattttctaaatattaaaaatttaaagatccataaggggcttacaccctactcatggcttacgtcttgccttttactaagtaaattgtccaagagttgctcaagcatattagtggcctaaagcaaaaatcacttattaataatttttatataattgatttcttctagatttcaattgataataataccattgttattttaaattatttttcatgagatataatattccaaatatgtcaaatttcttttaataattccttcatttcatctaataattccttcatttcatgaaaagtttactttttatacaaataatattcaatattttttttaaaaaaatactccttataacctattattattaaatatgaaacccttaagttttggggtctaagacacatgtctttttttagcactgtcgagtcacctctaaaattgtctcgccttacgcgcgtgttcgttaaaacactgcgcagaatgattattataaaaggaagtgttatttgtagttttgatgatgtgacaaactcagagaccttgtaaaggtaccaggttctcaacatgagttttgatgatgtgatatactcaggaaccttgtaaaggtaccaggttcccaacatgaatagcctgttgactgccagccggagaaggtacagaatgggtgcacatttaccaatggcgtgagaaaagtcagaccttttcaacaaatggcaagagtttaaggaaagggacttgtctatacaatgtcactttcctaaacatcattccttagtttttgcaacttgaaaaagtactctcacgaacatttgcaaaggctatagaaaatccaagtgaagaattattcaaataacaactgaaaattcagaagcatatcgtgtagttgtttgagaatatattcttgtggtcttacattgtaaactgttcctaaatctataaaggaatcagtgtggtggtgttgaaattctaagttgtcttgaagggatagcttagtgggtagaataacttctacttatgcttatcaagcaaaagagttattgcttgatcgtgagattaaaaactttctctcacatttgtgtaactggttttacttttacttgcgaattttagtgaaacagttgtgaaaatcctgtgagacaggtcgtggttttactctcttaagcaaggaggtttccatgtaaaattattgtgttgtcaagctgcatttactttctgtttatactttgtgtgtcaagggacctggtccattgactgataagtagacgcataaattctaacagtaagatacttctcctttttctttaatacaagtaatgtaatttatctctaagaaaatataaaagttcaacaaatgaaagggcaagtatgaaaaaaataataatacaaacttacctcttcaattttaaacaatgattggtataaaaagatgctgccccacgttgtctctctctttcttttttatcgttcacatttttaggaaacttgggctacagcaaaagcaaaagtcattactatactcatttttttgtagctacttaaaaaagagaagaaaaaaatggctgaaattcttcttacatcagtaatcaatgaatctgtaaaaatagctggaaatctactgattcaagaaggaacacgtttattttggttgaaagaggacatcgattggctccagagagaaatgagacacattcgatcatatgtttgacaacgcaaaggcctaggaagttggaggtgattcaagggtcagaaacttattaaaagatattcaagaattggcaggtgatgtggaggacctcttagaacgtatagaactttaattacgtaatcaatttttgttgtttgattttatagatttagacaatatatatataattatttatcgttcaacaaagaagacgattgtgtattcgggttgttcatgaatttcaacttttactatttcattttgaattttttggttagtcatttctatcaatttgcttaggacacctgtgcggaattgttatactactccctttatttcatattacttgaatttgtgaggcaatgcctatatatattaagaaaaatattcaaggacataatttaaatcatgattctattattttcctttgtggaatcataaatataactttgtaagtagtttaatttatctcctaaagcgtacagaacttcaataaataaaaggacaaatatggaaagaatttcaaacatccttcttaaactttgaacaattcaattattatgaacaatgcaaaaacttcaaaaattcactttaatataaaataaaggtaatataatataacatgattttttttttaaaaaagaaaaacatatttgttacatatcactgttgggactcgtcctagggcaaaactctggcaaaacgcctcgagactgaactttgggtcttagttcggtaagaatcacgccctaaactgcagattgtacgtcctaagtacgcccaacacccaacgttcggggctcgactaacatatcttatacaaagtaattatgtgttaaaatctgtatagttaacatttttgaccctcatagttcttgaataaatgaatgatacttaataatttttaaatctgtagagataatagtaactcaaataattagttgtagtatcacatttttactattttataacaatgtaaagatgataatataatatgtaacatttctttcaaaacatatagcaaatttttactttttcttgcttattattgattttcttggttttgtcatttgtgtcaaaactatcctattttatttaactatttgaaaataattttattttgattcatgatatagtgatatttttattataataatattattgattattttcttttagggggtaaaaattttaacatcgatagggcgctcaaagcttacgccttgtacttaaagacgcccccttgacaagactgcagcgagtgattgtcatagaaaaaagaaatttctcctttttcattaatgtgcagctgccccacgttgtcactccccttcttctttatcatttccttcttgacattattaggagacttggccgtggactccatctaccactaaaaagctaaagccatcagtatactcattttttggtagctactgaaaaagagagaaaaaaaaatggctgaaattcttcttacatcagtaatcaataaatctgtagaaatagctggaaatttactgattcaagaaggaaagcgtttatattggttgaaagaggatatcgattggctccagagagaaatgagacacattcgatcttatgttgacaacgcaaaggccaaggaagctggaggtgattcaagggtcaaaaacttattgaaagatattcaagaattggcaggtgatgtggaggatctcttagatgacttccttccaaaaattcaacaatccaataagttcaattattgccttaagaggagttcttttgcagatgagtttgctatggagattgagaagataaagagaagggttgttgacattgaccgaataaggaaaacttacaacatcatagatacagataacaataatgatgattgtgttctgctggatcggagaagattattcctacatgctgatgaaacagagatcatcggtttggatgatgacttcaatatgctacaagccaaattacttaatcaagatttgcattatggagttgtttccatagttggcatgcccggtctggggaaaacaactcttgccaagaaactttataggctcattcgtgatcaatttgagtgttctggactggtctacgtttcacaacagccaagagcgagtgaaatcttacttgacattgccaaacaaattggactgacggaacagaaaatgaaggaaaatttggaggacaacctgcgatcactcttgaaaataaaaaggtatgttatcctcctagatgacatttgggatgtggaaatttgggatgatctgaaacttgtccttcctgaatgtgattcaaaagtcggcagtagaatgataatcacgtctcgaaatagtaatgtaggcagatacataggaggggaatcctccctccatgcattgcaacccctagaatccgagaaaagctttgaactctttaccaagaaaatctttaattttgatgataataatagttgggccaatgcttcacctgacttggtgaatattggtagaaatatagttgggagatgtggaggtataccgctagccatagtggtgactgcaggcatgttaagggcaagagaaagaacagaacatgcgtggaacagagtacttgagagtatgggccataaagttcaagatggatgtgctaaggtattggctctcagttacaatgatttacctattgcctcaaggccatgtttcttgtactttggcctttaccccgaggaccatgaaattcgtgcttttgatttgataaatatgtggattgctgagaagtttatagtagtaaatagtggtaataggcgagaggctgaggatttggcggaggacgtcctaaatgatttggtttctagaaacttgattcaacttgccaaaaggacatataatggaagaatttcaagttgtcgcatacatgacttgttacatagtttgtgtgtggacttggctaaggaaagtaacttctttcacaccgcgcatgatgcatttggtgatcccggcaatgttgctaggctccgaaggattacattctactctgacaatgtcatgattgagttcttccgttcaaatcctaagcttgagaagcttcgtgtacttttctgtttcgcaaaagacccttccatattttctcatatggcttattttgacttcaaattgttgcacacattggttgtagtcatgtctcaaagttttcaagcatatgtcactatcccaagcaaatttgggaacatgacttgcttacgctatctgagattggaggggaatatttgtggaaaactgccaaatagtattgtcaagctcacacgtctagagaccatagacattgatcgacgtagcctcattcaacctccttctggtgtttgggagtctaaacatttgagacatctttgttatagagattatggacaagcatgtaacagttgcttttctataagctcattttacccaaatatttactcattgcatcctaacaatctacaaaccttgatgtggatacctgataaattttttgaaccgaggttgttgcaccgattgatcaatttaagaaaactgggtatactgggagtgtccaattctaccgttaagatgttatcaatatttagccctgtgcttaaggcgctggaggttctgaagctcagtttttccagtgacccgagtgaacaaataaagttgtcatcgtatccacatattgctaagttgcatttgaatgttaacagaacaatggccttgaactctcaatcatttcctccaaatctcatcaagcttactctagcctactttagtgtagaccgttatatactggcagtacttaagacatttcccaaattaagaaaacttaaaatgttcatctgcaagtataatgaagaaaagatggatctctcgggcgaggcaaatggttatagctttccgcaacttgaagttttgcatattcatagcccgaatgggttgtctgaagtaacgtgcacggatgatgtcagtatgcccaaattgaaaaagctgttacttacaggattccattgccgaatcagtttatcggaacggcttaaaaagctgagtaaatgaacatctcaacaggtcagtttgctagtataactatttacgtacaggggtgcatcacagcaacgtgagtgtagtagtgttgtttcttgttgtggttgtttgttggttgttcagatctgaaagtgtgaagctcattagaacacgtctcatagtgatattaaatttacttttaaacaataaaggcgtgtaataagtcattgtaataattaaatcatgtaactgatttttcacgagagaaaatttatgtcattttcctttgtaaagataaagtagtcattggttccaattgtaagattaaatacttgaatacataatatcaggattttgaacacgataatcttacatagaaatcattaggggaacatacctgatgaggaagacatcttcacacacaaaaacgaaagtgttagtcgtaaattgatttctacctccttttcctaactttatgttaccacaatcgtcagcgatagaattattctagagaatatgtggttaactctagtgggtggagggaggaccaattcatagaggttgtgatttaatctgatacgtccatcaattaaccaatgtacggacgagatctattacttaataaatattatttatgatattacttggattacgactaaacttgggtcataagtaagaaataattaataataattcttacagtctcccacttggcccaataaccatatatcattaatatttaataaatattagttgcgcatacaatagatctcttctataatgtcaatcatgcataccacaatatgacaaactactaatgcgagttttgacggttgcacataaattttaagctacatacttccttccatatactactacattagcaacttatcatactaggttcataaggtataaaaacatataacattacggtccacaataatgcctcatataaactcatcttgtaatttctcaaaacaataatgtgtacaccattacgagaaacaagatgttcagaaacacataatttgagctc

SEQ ID NO: 256 - DNA, 3947 bp, Capsicum chacoense
  source 1..3947: mol_type = genomic DNA
tggtggtgcatttctgtcttcagctttgaatgttctctttgataggcttgctcctcatggtgatctgctcaacatgtttcagaagaataagaatgatgttcgactcttaaagaagctgaaaatgactttggtcggccttcaggttgtgttaagtgatgcagagaataagcaggcatcaaatcaacatgtgagccagtggcttaatgaacttcgaggtgctgtggacggtgctgaaaacttaatggaacaagtcaattatgaggctttgaggcttaaggtggaaggtcggcatcaaaatcttgcagaaacaaacaaccagcaagtaagtgacctcaaactgaacttgagtgatgattattttctcgacataaaggagaagttggaagaaaccattgaaacattggaggatttgcaaaagcaaatcggtgaccttggcttacagaagcatttagatttgggtaagaaactagaaactagaacaccttcaacttctttggtcgatgaatctaaaatccttggtagaatgattgaaaaagagagattgattgaccgtttattgtcaagtgattcaaatggagaaaatctgactgttgtccctattgttggaatggggggcgtgggcaagacaacacttgctaaaattgtttacaacgataagaaggtgaaagatcattttggcttgaaagcttggttttgtgtttcggaggcatatgatgctttcagaataacaaaaggattacttcaagaaattggatcattcgacttaaaggatgacaacaatcttaatcagctacaggtaaaattgaaggaaagcctaaagggaaaaagatttcttgttgtccttgatgacttgtggaatgatgactgtgatgagtgggatgacttgaaaaatctttttgtacaaggagctatgggaagtaagatccttgtgacgacacgtaaggaggatgttgccttgatgatgggtaatggggcaatcaatgtgaagactctgtctgatgaagtctcttgggatctattcaaacagcattcattaaaaaacagggatccggaggaacatccagaacttgaagaggttggaaagcaaattgcagacaagtgcaaaggattgcctttagctctaaaggcacttgctggtattttatgccgcaaatcagaggtgtacgagtggaaaaacgtcttaagaagtgaaatatgggagctgccaaggcgtaagaatggtatattaccagagttgatgatgagctacaatgatcttcctgcacatttgaagcgatgttttgctttttgtgcaatatatcccaaagattataaattttgcaaagagcaagttattcacctgtggattgctaatggtctggtacaacagttgcattctggtaaccaatactttaatgagttgagatcaagatcattgttcgaaagggtcccagagtcttctgaaagatacggagggaaattcttaatgcatgatcttgtcaatgatttggcccaaattgcatcttcaaaactttgtgtcaggttggaagagtgccaaggatctcatatattggaacaaagtcggcacacgtcgtattcaatggggagagatggtgactttgagaaattgaaaccgctctctaagtcagagcagctgaggacattgcttccaatctctatccagttcctttaccgccctaaactaagcaagagggtgctgcataacatattgccaagactaacttacttaagggcattatcattgtcatgttatgcgattgtggagcttccaaaagatttgtttatcaaatttaagctcctgagatttttggacctttctcggacagagattacaaaattgcccgattctatctgtgcgttgtataacttggagacacttctcctgtcatcttgtgatgatcttgaggagctaccgcttcagatggagaagttgatcaacttgcggcaccttgacatcagcaacacttctcgcttgaagatgccgctacatctgagcaagttgaaaagcctccaagtgctagtgggagccaagtttctactaggtggcccctgtggttggagaatggaagatttgggtgaagcacattacatgtatggatctctatcaattttagaattgcaaaatgtggttgatagaagggaagctcagaaggcgaagatgagggataagaagaagaatcatgttgagaagttatcgttggagtggagtggaagtgatgcggacaattcacaaaccgaaagagacatacttgatgagctacgtccacacacaaaaataaaagaagtcgaaatctccggatatagagggacacagtttccaaattggctagctgatgattcgtttcttaagctgctagtacaattgtctcttagcaactgcaaggactgtttttccttgccagcactaggacagcttccttgtttgaaattcctttccattagaaagatgcatcgaataacagaggtgatggaagaattctatggtagtccgtcctctgaaaagccttttaacactcttgagaagcttgaatttgcagagatgcctgagtggaagcagtggcacgtactagggaacggagagtttcctgcacttcgggacctttcaattgaagattgccccaagttggttggaaatttcctcgagaatctttgttctctgacgaaattgagaatctcaatatgtcctgaactcaatttggagacacccatccaactttcaagtctaaaatggtttgaagtttctggttcttttaaggctggatttatttttgatgaagctgaactgttcaccttaaatattttgaattgcaactctcttacctccttgcctactagcactctgccgagtacgttgaagacaatatggatatgtcgttgccggaaattgaaattggaggcaccagatagtagtaggatgatttctgacatgtttctggaggaattgagactggaggaatgtgattctgtatcatcaactgagttggtcccaagagcacgcactttgactgtgaagaggtgccaaaaccttactaggtttttgattcctaatgggactgaaagactcgatatttggggttgtgagaatcttgaaatattttcggtggcatgtgggacccagatgacgtttttgaatatccactcttgcgcaaagctgaagcggctgccagaatgtatgcaggaactccttccatctcttaaggaactgcatctgtggaattgtccagaaatagaatcctttcctgatggaggattgcccttcaatttacaactcctcgtgatcaactattgcgagaaactggtgaacagtcgaaaggagtggcgtctacagagactccattctctcagagagttgttcatccgccacgatggcagtgacgaagagattgttggtggtgagaattgggagttgcctttctctattcaaaggcttaccatagacaatctgaaaacattaagcagccaacttctcaaaagcctcacctctcttgaaactctagattttcgtaatttacctcaaattcggtcactgctagaacaagggcttccctcctctttttctaagctatatttatacagccatgatgagctccattcactacaaggtcttcagcacctcaattcggttcaaagtctattgatctggaattgccctaatctccaatctcttgcagaatcagcgttgccctcctccctctctaagttgaccatcagggattgccctaatctccaatcccttcccaaatcagcatttccctcctccctctctgagctgaccatcgagaattgccctaatctccaatcccttccagtaaaagggatgccctcttccctctctatactatctatttgcaaatgcccatttctcgaaccactcctagaatttgacaagggggagtactggccagaaattgctcatattcctgaaatatatatcggtcgcactatgt

SEQ ID NO: 257 - DNA, 18284 bp, Solanum tuberosum
  source 1..18284: mol_type = genomic DNA
tgcgcaattcttactgttttataccttttctccctctcttcctctccatcattttcagccttatggatattattgttatgttcctcatgagtatcaacatgcatattcttttctccaaattgttgttcatctcttacaatattattatcataaatttcaccaacattcgtatgatttcggccatttgcttctagaccttttatcgatttctccctttgtattttttctctcaatacaagttgccataagtatttcacaatttccttgttgaatggattttccaagcaaaaataagctccattttccaaagcgttcttggctaagagtctattgagtttatcacctacaactgcataattatattgagaagttaaaaattaaaattaaattatatcatacattatgagaatagttaatttcacacatatatttactgaattttatctgttatgacaacaactttgttatgaaacaatcatttatcatataactataactaaaaacaagattaacaatggatagatgtcgtctcttgacaatagattaacgataaattttatagctaattatatttttgtggtgtattaattgaaacaactgactttacccaatatttataacaagaagtgaaaaatagaattataaatacttaccaagagagattatatttaaggttacagcttgtgtcaagagttcaaaacaatgtaaatctgatgaattgacatcgattatcatcatgtcaatttttttcttttctttggagagcattgacattgccgcaggagtcgtaactgtcgtaactgtatatatccatacattttaaagttaaagttagtgaagaacatgaaaaaaatattatacacaaagttatcatttggatatgtttatttaatttctcattcaaattcaattatgaaatttcatattatgttgctatactttaatttatgaaataacacatattaatcaacttatatcgtaaacggtgtgtgtaatgacccgaaaggtcattttggtaatttttcgtggaaatgactattttgccctttcggtagttgccccgagtcccatgttttatggttgtaaagttagtttgaggaaaagttggtaaaaagttgagtttttgagaagttgagtttttatgagttaaagttggttaaaaagtgctttttcgagttatttggagtttcgggactcggattgaatttccgtcgattccggcaattttagaatgtcgaaacgggtctgtgtgaagttacggagttgaatttggagttgaaacgaagaattgaggtcctaagttgctaaagttgtgaaattgtgataaagagttgactttggtcaacatatgaggttccgaggctcggattgaaattccgaaagtaccgttggtttcgggaggcgattctaagtctagaatgagtcttggttgaatttttagacgctctgtttgagtttcgaattttttttgcgttaaactagtttcttggcatcttattgaatttcgggtcaaggagtcctcgaattcaaattccgacggttccattgagtccggaacgtcgaatttagtgggggtacatatttagtttgtgtgcacgagattccgaacgaatcccgagggtccaacggggacttaaactttggtgttattgttgtgtttcagctgcaatagcagtcctttttaagtcaaaaaacagtagccattttcccccaacttgaaaaatatccatttctacatttttagactttgagagctcgaaaataggtgatttcaagtgggttttcacaaggaattcattgggtaagttatttccaacttatatctttgatttccatcgattatttatggattttaacatcaaaatttgagatcccaactgaaaaatttgggggtttttgcctagtccgaatttaatagaaaatttgagtttgtgaactcatttcaactcctttttcgaaacggttttcactattggattctaaatttcttggggaacatttttcactaaaaatttccagatttcgagaatattttttcggaacgagttttttttgaccattttacccttttctccaaatttcacgatattggtgttgttagattcgtattgattgtgagattccatttatgaatagattgtggtgatttggagcgtgctcgaaagggtaaaactcaaatttgagttactagttgaagtgttttgaggcaagtgacttctaaactttgttaaactcttagactacacatgactactttcctaattgtgttggggagtaatggggattgaggatgggttttatttgttgattgaaattgttgtaaatgaaagatggggaataaaacgagctaagtgtgttatatgtgacttgaatttgttgaataagtcatgtgataaccgatattgaggggatagaagagcatgagtaagctatgattgatacagacattgatgttgagacagatgatgtgtaatactatgatatggttgtgattgagacagacgatgtgtaatactatgatgtggtcgcgatatggttgtgattgagacagataatctgtaatactatgatgtgatcgtgatatgattgtgattgatgacatgtgcatattcattattcatctcatgtgtgaactatctgttgcatgagttctgagacactgatatgaggatggatggctatgagacacagttgagactagctccggctagagatatatgagatggactagctccggctagcgatttggatgccgatgggatctggttccggcggtgatacatggtccatgtgtggcccccatgggttctgatttgagtattcagcgcggactgattacgtcaacagatatgtatcgtaggacagacatgcatcatgactatatgacattattattgcatttgcatcgcatttgacttcatctttgtctgtggtgtgtggagtttacctatttgcccctcttcatgtgatatatgatctatttgctcttacatgaggatatgaggttgatgttgagacactgttggatatatctgttgattatgaattgtgtagtataggttgttggttcgctgttagaatgaagtctcggtggttcggttgggattgaaaggagttgtttgtagctgctagtttagcttagtttagtgttacttgcgagtacctgttgcttttggtactcacccttgcttctacacagtggtgtaggttgacagctctatcagattcgacttattactcatcttcaaattagagcttccagacttacttgagaggtagcggttcattccagacgtgccctcaagttatctatatttattgttttgttctattatagaactttactatgagacttgtatattttattcagattccgtactagaggtttgtacatgtgacaaccaattctggggtttcattgagtttatttaaagacttccgcttatctttctatcttattcttgttttattaattccgtatcgtcgggtttttgggtgttaggcatcacatccggttttggagtgtgacagtgtgtgcaatcttactaatatataatattactttagagtaactaactgtaggaatatataatagagaagattctataggaataattctaaagaatacattctaatttattctttgacttgttgaaaacaaataaacactgaatatatattagattaaatactattaaagcaagatataataggataaaaagttttaagataaatttatgtaaaaagttttaaggttattttatttcataaataagtaacgagagtttaggagatttaacaaattattagaaaggagttaccaaaattatgttgaaaaggtttaacatagcttgattaaggaacaatcgatattaaatactaacaaagtaattgaaaatgaaacaaaaataaatgaggaaaaaatcacatgaaaagatttttcttttcttgtctacatctaataaaagacaaaaaagaaattgaagaaaaaaatcatgaaaatcatatgtccctatttatttgtttgtctacatcgaataaaagacaaaaaagtcatctcagataataatgatagtcagatcatctcttatcatgtctttatctcgctcctctctgttgggttctaaagggtgattagggcttgcaaataatatgattgataaattagttgacaaaaacttatactaaaaactaatattattatatgaaaactaatataaagaaaaatattaaaactgttgagagattaaatctccccataaacaaaactcactaaacgactacattgtggattctattatgttgtgctatgagaatagggatcttcaatttatagatctccaaatttttcctctaaggaaagaataaaccaaatatggaagaaaattatatttttcttttagaaaaagttcaagcatttatggtaatactttgacttttctttaaagaaaaaataaacttcaaataagataagaaaatcagggcaaaaccctaacactctcttcgatcccttactcttattttgtgcctcaatcatccaagtgaatttgttttctttctaaaacgatatatagatttgcaaaaatcaaagatctgtaatttcaaaatcatttatgagggacctaattattttctcctccaacacgatgtcactctaggccgattgacaaagaataagtttcctttttattttttgtacaaaaaagtcaagtgtgaaataattaatataaacttaaactacctcctttatggaaaaatatccgataaaattagaacaacacatactttaacataaaattattgaacctcttaaaaattacacaatcgttatggagaaagctaatcgagtatgtgacatggttataacaaaaacaaaaatggagaatctaatttaattccttataatcatacaaaattcatttattaacttgtaaaacaacatacacaagcatagaaataatgttatgataacaaggaaaggaaaagttctcaataaacatcatatcaattaattctctctatatataatgaaagtcagacagaaattagttctagatatatcacctttgtatccattgaactctagtaaatcaaccattggattagaaaccaattcctcatcttgatataccagcaacacagaaacctcttcagtcaaatcataaaaaggttctgtcattagattaatttgaatttgtaagaaaaacacttacaactgaagctatttataaagtatcatttactggcttatgagcctgtttagagataattatatataaataattttatctaaatatctagataatccctcaaatttgacacaaattgtaatttagatacttgaatttatctaaaagagaccaaataaatacttttactattgtcatatacgcactcatgaacaccttatgctgacatggcaaatttatgtgtattgtaaatgcttgtgttattacattattgaatcacaataaaaagattatttcttaaaaaaattaaatttttgattgacttttattccaacaatcaaattatacaacttggggttcattaactatttctattaatatcaaaatttaacattgattattggatattatttgaagttattgaagatgacattatatttattaagtattaattacacttcttgaatagttggaagattctttgatttgtgtccataattcaatagttcaaatggtgaatgtcttgtcttcaagtaacggctaatggtcttagaattaggccttatttatttttgttcggataaattagcccagagatattctaaatagagtatgatattgtgcactttgaccaagttagcataattttttttttttcaaaaagtctcacacattatggaaaaattacgcgagttggcaaatactactaggttattagtcattgagggtagggtatagtttaatttatttactgtcagtaaatacagtttcagtttttttgccattaataatgagacccaccacctctttgtatacctgtcacaccccaaaatcggatgtgatggcacgtgcccaaaccccaccggacacgtcagcctaacacccaaaaacccgacgatacgaaattaataaaacaagaataagatagaaagataagcggaagtctttaaataaactcaacataaccccagaattggttgtcacatgtacaaacctctaatacggaatctgaataaaatatacgagtctcatagtaaagttctagaatagaacagaacaataaatatagataacttgagggcacgtctggaatgaaccgctacctctcaagtaagtctggaagctctaatctgaagatgggtaataagccggatatgacagagctgtcaacctacaccactgtgtagaagcaagggtgagtaccaaaagcaacaggtactcgcaagtaacactaaactaagctaaactagcagctacaaacaactcctttcaatcccaaccgaaccaccgaaacttcattctaacagcgaaccaacaaccaatactacacaattcataatcaacagatatatccaacagtgtctcaacatcaacctcatatcctcatgtaagagcaaatagatcatatatcacatgaagaggggcaaataggtaaagtccacacaccacagacaaagatgaagtcaaatgcgatgcaaatgcaataatgatgtcatgtagtcgtgatgcatgtctgtcctaagatacacatctgttgacgtaatcagaccgcgctgaatactcaaatcagaacccatgggggccacacatggaccatgtatcaccgccagaaccagatcccatcggcatccaaatcgctagccggagctagtccatctcatatatctctagccggagctagtctcaactgtgtctcatatccatccatcctcatatcagtgtctcagaactcatgcaacagatagttcacacatgggatgaataatgaatatgcacgtcatcaatcacaatcatatcacgatcacatcatagtattacacattatctgtctcaatcacaaccatatcacgaccacatcatagtattacacatcatctgtctcaatcacaaccatatcacgaccacatcatagtattacacatcatctgtatcaacatcaatgtctgtatcaatcatagcctactcatgctcttctatcccctcaatatcagttatcacatgacttattcaacaaattcaagtcacatataacacatttagctcgttttattccccatctttcaattacaacaatttcaatcaacaaataaaactcatcctcaatccccattactccccaacacaattaggaaagtagtcatatgtagtctaagaatttaacaaagtttagaagtcacttgcctcaaaacacttcaactagtaactcaaatctgagttttactcttccgagcacgctccaaatcaccacaatctattcataaatggaatcccacaatcaatacgaatctaacaacaccaatatcgtgaaatttggagaaaagggtaaaatggtcaaaaaaaatctcgttccgaaaaatattttcgaaatctggaaatttttagtgaaaaatgttccccaagaaatttagaatccaatagtgaaaaccgtttcgaaaaaggagttgaaatgagttcacaaactcaaattttctattaaattcggattaggcaaaaaaccccaaattttacagttgagatctcaaattttgatgttaaaatccataaataatcgatggaaatcaaagatctaagttggaaataacttacccaatgaattccttgcgaaaatccacttgaaatcacctattttcgagctctcaaagtctaaaaatggagaaatgggtatttttcaagttggggaaaatggctactgttttttttgacttaaaagggctgctattgcagctgaaacacaaccataacaccaaagtttaagtccccgttggaccctcgggattcgttcgaaatctcgtgcacacaaactaaatatgtacccccactaaattcgacgttccggactcaatggaaccgtcggaatttaaattcgaggactccttgacccgaaattcaataagatgccaagaaactagtttaacgccaaaaaaattcgaaactcaatcggagcgtctaaaaattcaaccaagactcattctagacttagaatcgccccccgaaaccaacggtactcttggaatttcaatctgagcctcggaaccttatatgttgaccaaagtcaactctttatcaaaatttcacaactttagcaacttaggacctcaattcttcgtttcaactccaaattcaactccgtaacttcacacagacccgttttgacattctaaaactgccggaatcgacggaattccgatccgagtcccgaaactccaaataactcgaaaaagcactttttaaccaactttaactcataaaaactaaacttctcaaaaactcaactttttaccaacttttcctcaaactaactttacaaccacaaaacatgggactcgaggtaactaccgaaagggcaaaatagtcacttccacgaaaaattaccaaaatgacctttcgggtcattacaataccgaatcaacaaagccttcatcggcctttatttatgattttatacaaaatcaaatttatctctcatctcctctcctctcctcatttcctatttttctcctaaaataactctttcacttccaatttgaaattcgaatttcactttctccctccagtcgtgttttactttttgcaggtaaccgcctaaatcataggtgaacctcttttttttttttttttcatttttcaattgtatatgtattgtgcttgttagtgtttggataattttttctcaaaattccctcattacttattagataatcatttttatagaaaataaaatggatgattcgactagaggattatgagaggtacgtcattgcatgtcaaagtttttaataatcaaccttcattttcactctgtttaactcaagattttggagtcaatgcagggtctatggaaaaatctaaacaaattctagagtaaaaatctattgaagaattgagatccaagaaaaaaatgacccaattgcacttccagaagtcatcaacaatgtcaaggcaagcgacattaaaattgttgaaggagaaagtaagaggaaagccaaagatagtgattctgaggaggttgtgtctccttcattagatcaagacaaatacgaagaacatcaggtatttgcttaaaacacaattgtatgtagatatttgtatattttgttagtgatatacaaaattgtatgtagtatatgtatattttctgcttacatcacaattgtatatagatatttgtatattttgttagttatatacaaaattgcttgaagtatatgtatattttttgcttaaatcataattgtatatatatatttgtatatcttgtaagttatatacaatagtatgaattaaacaatatacaaaccttacattattatatatacagttaggttacaccaaaaattatcaaattaaagcacaacttttttatcgaatcatatacaattcatatatataattgacttagtaattttatacaactacttacacttatacatggtataagaattttgcacaattacttacatatatacaatattatcaattaaacaatatacaaatcgtataacttatatatacagtaaaattacaacaacaacaacaaaaattatcaaattaaagcacaccgttgttgtcgaatcatatacacttcatatataaaaattgtgtcattcaatttttcgaacaaaaaattagaattgaattggtaataaaaaatttatctaatcttgtataaacaaaattaaattattgcaaaccattagaatgaaaaaaacaaaaataatccgttttccaaaatttcaattatatactatacaaatcaattgtatactttcttgctgttcaaaacatgaagtttccttgaaagaaacgcttacctagcgttgaatatacaagaatattgattaatcttatgcttcagtcgtttgaggaacccagttgttatggtgtttctattgctatagaactcctttttggaaaaatatttgattttggacgattagcttgaacattgggactatataaattttttattaccgtatttagcactcatgtatccatttattaaaaaaaaatgtataaattatatttttaaaagaaaatatacaaaattaatgcttcatagcaaactaaactatgcccattgaatgtaattactaaactatacctatagagcgttatttcattaaatacgtttatcatatatgaaattttcccttaagagatcctacaccttatatatagcttctcaaatgtggaaattcaatctcacacccaacaatctttccctcagactaagtttcatggcccaatatcacaatgatccacgagtcaattcatgagattcactatgtgcatcacccacatcgtctaagtattttatggcaatcaagccctacaactagcttcttctttatatatatatgtgtgtgtatatgtgcgcgcgcgcgcatctctaattaatctcgtaaagggattaaggggccaatttcaaagaattaggcgattttcttagtttttcgtgtgtgttaacccataaatattttggtgatatggttttcggacgatttcttttgtgcaacttatatggaacccttcgtagggagttagtctcacactttttagagtccattttgggcactcaggggctaatttataggaaataggtgatcttctcagtccgtctgtattagcccatgaatattttggtgatatgtcttccgaataatttctttgtaaaatctttacgggaccctccatagggagttaatggagcagtacgtatagtctcacaattttagagttcattttgggcatttaggggccaatttacaggaattaggtgactttctcagtgttttgtgtgtgttagcccattaatatttggtgatatgactttcagacgatttctttgctacacatttacgaaaccctctgtagggagtcgggggagcagtacgtacaatctcacaattttagagtccattttagacatttaggggccaatttaaagaaattggacaattttctcagtttttcgtgtctgttagccattaatatattggtgaatatgacctacggatgatttctaatagaaatctttacgaaaccttcaatagggagttgggggagcaatacgtaccgtctgacaatttttagagtccattttgggcatttaagggccaatttacaggaattagacaattttctcagtatttttccatgtgttagcccataaatattttgttgctttgacttttagagtctaaacttctcatgtatattaagagatatttatgcttggttaattgaatcgaactaggaatagagaaattcctacttggatcttaatatttctctctctttgatttggaaaattctacgaagttgctttcaatggaattaaaatcataaatctattgtatgtaagaaacatacttatattcatgaatagatatgtgtagggtctaataatgaattatcacaattttttctactttttcctgtcagagtcctgctttttctttttctttttcttttttaactttggtctctgcttttgtctacatgatgataaggttggtggacctagctggaaatgtgatggaaatagctagtaaaagaaagaactttgcattttctgttttcttaaaaactgaaaaattacataacttgtggcaatttgttcattttcatactgagagatatttctattttttggatatatggcttatgctgctgttacttcccttatgagaaccatacatcaatcaatggaacttactggatgtgatttgcaaccgttttatgaaaagctcaaatctttgagagctattctggagaaatcctgcaatataatgggcgatcatgaggggttaacaatcttggaagttgaaatcgtagaggtagcatacacaacagaagatatggttgactcggaatcaagaaatgtttttttagcacagaatttggaggaaagaagcagggctatgtgggagatttttttcgtcctggaacaagcactagaatgcattgattccaccgtgaaacagtggatggcaacatcggacagcatgaaagatctaaaaccacaaactagctcgcttgtcagtttacctgaacatgatgttgagcagcccgagaatataatggttggccgtgaaaatgaatttgagatgatgctggatcaacttgctagaggaggaagggaactagaagttgtctcaatcgtagggatgggaggcatcgggaaaacaactttggctacaaaactctatagtgatccgtgcattatgtctcgatttgatattcgtgcaaaagcaactgtttcacaagagtattgtgtgagaaatgtactcctaggccttctttctttgacaagtgatgaacctgatgatcagctagcggaccgactgcaaaagcatctgaaaggcaggagatacttggtagtcattgatgacatatggactacagaagcttgggatgatataaaactatgtttcccagactgttataatggaagcagaatactcctgactactcggaatgtggaagtggctgaatatgctagttcaggtaagcctcctcatcacatgcgcctcatgaattttgacgaaagttggaatttactacacaaaaagatctttgaaaaagaaggttcttattctcctgaatttgaaaatattgggaaacaaattgcattaaaatgtggaggattacctctagcaattactgtgattgctggacttctctccaaaatgggtcaaagattagatgagtggcaaagaattggggaaaatgtaagttcggtcgttagcacagatcctgaagcacaatgcatgagagtgttggctttgagttaccatcacttgccttctcacctaaaaccgtgttttctgtattttgcaattttcacagaggatgaacagatttctgtaaatgaacttgttgagttatggcctgtagagggatttttgaatgaagaagagggaaaaagcatagaagaggtggcaacaacatgtataaacgaacttatagatagaagcttaattttcatccacaattttagttttcgtggaacaatagaaagttgtggaatgcatgatgtgacccgtgaactctgtttgagggaagctcgaaacatgaattttgtgaatgttatcagaggaaagagtgatcaaaattcatgtgcacaatccatgcagcgttcctttaagagtcgaagtcggatcagaatccataaggtggaagaattggcttggtgtcgtaacagtgaggctcattctattatcatgttgggtggattcgaatgcgtcacactggaattgtctttcaagctagtaagagtactagatcttggtttgaatacatggccaatttttcccagtggagtactttctctaattcatttgagatacctatctttgcgttttaatccttgcttacagcagtatcaaggatcgaaagaagctgttccctcatcaataatagacattcctctatcgatatcaagcctatgctatctgcaaacttttaaacttaaccttccatttcccagttattatcctttcatattaccatcggaaattttgacgatgccacaattgaggacgctgtgtatgggctggaattacttgcggagtcatgagcctacagagaacagattggttttgaaaaatttgcaatgcctcaatcaattgaaccctcggtattgtacagggtctttttttagactatttcccaatttaaagaagttgcaagtatttggcgtcccagaagactttcgcaatagccaggacctgtatgattttcgctacttatatcagctcgaagaattgacatttcgtttatattatccatatgctgcttgctttctaaaaaacactgcaccttcaggttctacgcaagatcctctgaggtttcagacggaaatattgcacaaagagattgatttcgggggaactgcacctccaactttactcttacctcctccggatgcttttccacaaaaccttaagagtttaacttttaggggagaattctctgtggcatggaaggatttgagcattgttggtaaattacccaaactcgaggtccttatactatcatggaatgccttcataggcaaggagtgggaagtagttgaggaagggtttcctcacttgaagttcttgtttctggatgatgtatacattcgatactggagagctagtagtgatcactttccgtaccttgaacgagttattcttagagattgccgtaatttggattcaatccctcgagattttgcagatataaccacactagctcttattgatatagattactgtcaacaatctgttgtgaattccgccaagcaaattcaacaggacattcaagacaactatggaagctctatcgaggtccatactcgtcatcttttgtaagacatcttcttccttgctttacaacaataattaactcatcatcatagtaaactcgataataatctggataatagccttagtaagtcaaattgcaccaattcaacaaaagttcttgatgctgtcattgtgtttgatttgaatccttccaatattgtgtaacttgttatacttgcatgttcattcttgattttgggaagtgtaacatttcatttttcatcttttgtggctagcattcccaagagtgtgacaacagttgaagatgatgatgatagtgtgacaacagatgaagatgatgatgatgatgactttgagaaagaagttgcttcttgccgcaataatgtgtaagttcttatacctgcatgctcattcttgctataatgttctcttgttccttaattatgggacatctgacatattattttccatgttttgcgtcttttatttttctgcagcgagtagttaaggtgttctgaggactagccagttctctgaaataaatgtcaaatcagaagccaaatgtgtgagtgtttgttttgttcgttttcattttttctgcataaggtggcaggatgattgcaaatggcttgtaatttaattgtatatgatctttcgtatagccatttgtcagtggttcttaagatactccaaattttatgcacatacatacatactgtacaggccagaacagactccagtaacgtgtgtttcctttcttgggagtcctcaatctacctcgcaaaggctaaatccagtggcaccagctttattactaaaacattcacacgggaacagttgagaaaaactaggcctccataccaaacacacccttaaacttgagctggttgatagagactagagagtagagagcactacatggattatggacctagctaaaagaaagaccttttgtttgaagataagcttaagaaattcgcacactctctgtcaccttgacacaagtgttctcctcgaccccaactaataatgtatgatcacaaatttcctgtcttttttttaaactttggtctcttcttttgtctacatgatgataaggttagtgacctcgcatctttctactttatcctgttagtggacctagctggaaatgtgatggaaatagttagtaaaagtaagatctttgcattttctgttttcttaaaaactgaaatattacataacttgtggcaattaatttgtccattttcatactgagagtgagagagtcctattttttggatttatggcttatgctgctgttacttcccttatgagaaccatacaccaatcaatggaaattattcaatgtgatttgcaaccgttttatgaaatatgttttttgacttacaaacattgaattaaaatcttttgaacttttataaattaagatttttttcttttaaagaaatcgatactgtaatcctctatatcaacgagcttactcatgtgaaggtcaagtgataaaaccaggggccagagccagtctagacctagggggttcggagcttttgtaattggatcattgtgattacgggttgaatgtctaattttctaggcgattatgatagtattttgtatctgaataatagctcactttttctaagtaatggaaaagaaggtcaaaacgtgccactaaaagacttgactaagacaaaaatgggttgtcaagaacgtagaggagggtaggatggacagttggtcagatctagtatggataatacatggaggtagttggagtggcggctctcccaaaattctgtcatcttagatctttggattcggtcttatacatatgtgaggaaggtaatgaaaaatattggggtagaggattacaacatggggaatcaagatttcagatggtcagtcaactaactgagctactaagatttcaaaaaaaagaaaaagaagggttccatgtgacatgaaagtctcatattgcatagtttttgaatgaggcaaagaagtgaggaatcagatgaaccaccttcgatggaaaattatactatttatacatatagttaaaattgttttctatctttatattattgtagtcagctaatttgcatgtttacttattcatattttgaatagacataatacataaatacatcctttaacttggcttcaaatcaaatttatgcccttcaactttggatgtgcacaaatagacatttaaatttgtataaagttgaagaaatagacacacatgtcctacatgacatcctacatgtcattttttatcctacgtggtgtcttacgtgtattgtgtcatgtaggactcgtgtggctagtcgctcaactttatacaaatttaagtgcatacttgtgcatacccaaagtcggagaacataaacgtcaaatgaggtcaagttaaagggcacatttatgtattatgccttcttgatttcattaataatgaaaatcctgaatcatattcagattccgtcactaatcgttgaattaatatactatgtattatttattggatttttttgctatcttatttttaattgttcaaagttttgtttattatctttagcataatatctgattatattattttgatatactttttctagccctaattacttgtccatttttgaattgacacacctattaagaaaacaattattgaaatagtgagtttactattttacccatattaattatgaagtgggtgatttaaaaactcaagattttcaaaaagttctacttttttcaaagtaataaattaagggtataatatgtaaaaaaaattattctttcttgatttgtcaaaatagaaaagtaattaggaataactaaaaaaatggataaataattaaaaacggagggagcaatatgttatctttagcctaataatatctgattaatggccaccctaattgattggataggagaggatagacttgcttccaagtaagccaaaatataaaaagttgacaaaagggtgctaaattcgagacacatgtagtacttatataattcatgtgcggactcgttcttttgtagtactccttccgttctattttatatgtcatatttttattttatactttcattaagaaatgatgtaattttatctttctattcttatttaatgtttttttaagtcaattttataataaatgatgaatatattttcaagattaattaactactctatcaagggtataataggtaaaatatggtaatttatacataaattttataaaatgacaagtattgtggtccaactatttatagaaagagatgacatataaaatgggacggagggagttataaagttgacttaagaaaacatttaataagggtagaagggtaaagttacattatttcttaatgtaaatgtaaagtaaaaatgtaacatataaaatgggaaggagggagtagtattttctcgttttattttacgtggcactctattctcataatctatctttaaaaatgtcattttattgtaattgaaaataatttaacttaaaattctccatctacccttaattaatgaaatgatttacaattatataaatatataaaaattgttttagcttataattttctaaaatctttttttctcttatacatcgtattaagtcaaacaatactaagtcaaatggaatggcggagtatttcttttattttttttcacaccgtccatatgttttctcccatcccccagacccccactatgtatattcactccttagttgaatctgaatttagagtttagaagctt

SEQ ID NO: 258 - DNA, 396 bp, Arabidopsis thaliana
  source 1..396: mol_type = genomic DNA
atgtctacaccatcaggttcaaatccgttaccaatggccgacaagttagaagcaaaaggtcgtatagcatccatcaagttcgactatgtcaagaatggtcaacctaaagctggatcaacccatggtgtctcatatcacaatttcaccgagtggtttgatcttaaccatacatgcgatgagcatatcttatctgtgaagtgttactacgatgatggtgagatacaaggacttgtgatcaaaaccaatatcaggacgtctgcatatatgggatataacattggtactacgtttacacttgaagtcaaaggcaagaagatcgttgggtttcatggatcttttgataaaaaccttacctcgcttggagcttatttcgcaccgctttctcctgctaagtaa

SEQ ID NO: 259 - DNA, 978 bp, Pepper mild mottle virus
  source 1..978: mol_type = genomic DNA
cacaaacacgtttttattccggctgtgtagtctttcaacgttgtcttccgatgcccgtgtttccaaacttcagccaagaaatcgtctaagcctaaccttttccaaatctcatactcgactgcacaatgaaattcgttctgtgatttgtcatacttggaaatgtctagctctaatatgtccataggaacattagagtccagatctgagaaaaattcttcgatctgtgtaggcgttttccttgtataaaacatgaatcttgaactgtcaattgtctctagcagctgtcttgttaattctgaaaatacaggaccaaaaagcgcattgattttcttgctatgatacacaatagtttgcaaagccgggtattcagtttgaatactaagatccaaacgctgtttcggctgctgcttgatcatgtgcctgtattgatcaacggctggtaaatcaataaagtcaaaatcagccaactggccaattgttgacttctcttgcttttcgatccatctttccaaactcgcccttgaaagcagaggtatattttttggttttttcttttctttaattaagtatgcatcaaaaaacttatctactactagagaagcggtgtcttcgatgtcaacaacccctactaattcgggagagttgaaatttcttttgatcatcgcgaccaaattttccaacaatccaggttttcgaggtttttcagcagcagtcctgatcacaggtttcaatgtcgtctcagattctctcggaagaggcaccgatttcgacatatccaacacacaatccttgacattcaaactattctctcgtatttgcatagttacagcatcatactcattgagtatagtactgtttcccggcaaacacttgtcgtaataatattgcatgtcagaaacatctcctgtttttggtgctgcgacgaaaaggttaacacctttgtacaccgattctatctgtaattgctattgagtcgac

SEQ ID NO: 260 - DNA, 2370 bp, Bacillus thuringiensis
  source 1..2370: mol_type = genomic DNA
atgaacatgaataatactaaattaagcgcaagggccctaccgagtcttattgattattttaatggcatttatggatttgccactggtatcaaagacattatgaatatgatttttaaaacggatacaggtggtaatctaaccttagacgaaatcctaaagaatcagcagttactaaatgagatttctggtaaattggatggggtaaatgggagcttaaatgatcttatcgcacagggaaacttaaatacagaattatctaaggaaatcctaaaaattgcaaatgaacagaatcaagtcttaaatgatgttaataacaaactcgatgcgataaatacgatgcttcatatatatctacctaaaattacatctatgttaagtgatgtaatgaagcaaaattatgcgctaagtctgcaaatagaatacttaagtaagcaattgcaagaaatttctgataaattagatattattaacgtaaatgttcttattaactctacacttactgaaattacacctgcatatcaacggattaaatatgtgaatgaaaaatttgaagaattaacttttgctacagaaaccactttaaaagtaaaaaaggatagctcgcctgctgatattcttgatgagttaactgaattaactgaactagcgaaaagtgttacaaaaaatgacgttgatggttttgaattttaccttaatacattccacgatgtaatggtaggaaataatttactcgggcgttcagctttaaaaactgcttcagaattaattgctaaagaaaatgtgaaaacaagtggcagtgaagtaggaaatgtttataatttcttaattgtattaacagctctacaagcaaaagcttttcttactttaacaacatgccgaaaattattaggcttagcagatattgattatacttctattatgaatgaacatttaaataaggaaaaagaggaatttagagtaaacatccttcctacactttctaatactttttctaatcctaattatgcaaaagttaaaggaagtgatgaagatgcaaagatgattgtggaagctaaaccaggacatgcattggttgggtttgaaatgagcaatgattcaatcacagtattaaaagtatatgaggctaagctaaaacaaaattatcaagttgataaggattccttatcggaggttatttatggtgatatggataaattattgtgtccagatcaatctgaacaaatttattatacaaataatatagtatttccaaatgaatatgtaattactaaaattgattttactaagaaaatgaagactttaagatatgaggtaacagctaattcttatgattcttctacaggagaaattgacttaaataagaagaaagtagaatcaagtgaagcggagtataggacgttaagtgctaaagatgatggagtgtatatgccgttaggtgtcatcagtgaaacatttttgactccgattaatgggtttggcctccaagctgatgaaaattcaagattaattactttaacatgtaaatcatatttaagagaactactgttagcaacagacttaagcaataaagaaactaaattgatcgtcccgccaagtggttttattagtaatattgtagaaaatgggaacttagagggagaaaacttagagccgtggatagcaaataataagaatgcgtatgtagatcatacaggcggagtgaatggtactagagctttatatgttcataaggacggaggattttcacaatctattggagataagttaaaaccgaaaactgagtatgtaatccaatatactgttaaaggaaaaccttctattcatttaaaaaatgaaaatactggatatattcattatgaagatacaaataacaatttagaagattatcaaactattactaaacgttttactacaggaactgatttaaagggagtgtatttaattttaaaaagtcaaaatggagatgaagcctggggagataactttacaattttggaaattagtccttctgaaaagttattaagtccagaattaatcaatgtaaataattggattcgcacgggatcaactcatattagcggttatacactcactctctatcagggaggaggaggaaatctaaaacaaaaccttcaattagacagtttttcaacttatagagtgaatttttctgtgaccggagatgctaatgtaaggattagaaattctagggaagtgttatttgaaaaacgatatatgagcggtgctaaagatgtttctgaaattttcactacaaaattggggaaagataacttttatatagagctttctcaagggaataatttatatggtggtcctcttgtacatttttacgatgtctctattaagtaa

SEQ ID NO: 261 - DNA, 2370 bp, Bacillus cereus
  source 1..2370: mol_type = genomic DNA
atgaacaagaataatactaaattaaacgcaagggccctaccgagttttattgattattttaatggcatttatggatttgccactggtatcaaagacattatgaatatgatttttaaaacggatacaggtggtaatctaaccttagatgaaatcctaaagaatcagcagttactaaatgagatttctggtaaattggatggggtaaatgggagcttaaatgatcttatcgcacagggaaacttaaatacagaattatctaaggaaatcttaaaaattgcaaatgaacagaatcaagtcttaaatgatgttaataacaaactcgatgcgataaatacgatgcttcatatatatctacctaaaattacatctatgttaagtgatgtaatgaagcaaaattatgcgctaagtctgcaaatagaatacttaagtaaacaattgcaagaaatttctgataaattagatattattaacgtaaatgttcttattaactctacacttactgaaattacacctgcatatcaacggattaaatatgtgaatgaaaaatttgaagaattaacttttgctacagaaaccactttaaaagtaaaaaaggatagctcgcctgctgatattcttgatgagttaactgaattaactgaactagcgaaaagtgttacaaaaaatgacgttgatggttttgaattttaccttaatacattccacgatgtaatggtaggaaataatttattcgggcgttcagctttaaaaactgcttcagaattaattgctaaagaaaatgtgaaaacaagtggcagtgaagtaggaaatgtttataatttcttaattgtattaacagctctacaagcaaaagcttttcttactttaacaacatgccgaaaattattaggcttagcagatattgattatacttctattatgaatgaacatttaaataaggaaaaagaggaatttagagtaaacatccttcctacactttctaatactttttctaatcctaattatgcaaaagttaaaggaagtgatgaagatgcaaagatgattgtggaagctaaaccaggatatgcattggttggttttgaaatgagcaatgattcaatcacagtattaaaagtatatgaggctaagctaaaacaaaattatcaagttgataaggattccttatcggaggttatttatggtgatacggataaattattgtgtccagatcaatctgaacaaatatattatacaaataacatagtatttccaaatgaatatgtaattactaaaattgatttcactaaaaaaatgaaaactttaagatatgaggtaacagcgaatttttatgattcttctacaggagaaattgacttaaataagaaaaaagtagaatcaagtgaagcggagtatagaacgttaagtgctaatgatgatggagtgtatatgccattaggtgtcatcagtgaaacatttttgactccgataaatgggtttggcctccaagctgatggaaattcaagattaattactttaacatgtaaatcatatttaagagaactactgctagcaacagacttaagcaataaagaaactaaattgatcgtcccgccaagtggttttattagcaatattgtagagaacgggtccatagaagaggacaatttagagccgtggaaagcaaataataagaatgcgtatgtagatcatacaggcggagtgaatggaactaaagctttatatgttcataaggacggaggattttcacaatttattggagataagttaaaaccgaaaactgagtatgtaatccaatatactgttaaaggaaaaccttctattcatttaaaagatgaaaatactggatatattcattatgaagatacaaataataatttaaaagattatcaaactattactaaacgttttactacaggaactgatttaaagggagtgtatttaattttaaaaagtcaaaatggagatgaagcttggggagataactttattattttggaaattagtccttctgaaaagttattaagtccagaattaattaatacaaataattggacgagtacgggatcaactcatattagcggtaatacactcactctttatcagggaggacgaggaattctaaaacaaaaccttcaattagatagtttttcaacttatagagtgtatttttctgtgtccggagatgctaatgtaaggattagaaattctagggaagtgttatttgaaaaaagatatatgagcggtgctaaagatgtttctgaaatgttcactacaaaatttgagaaagataacttttatatagagctttctcaagggaataatttatatggtggtcctattgtacatttttacgatgtctctattaagtag

SEQ ID NO: 262 - DNA, 2310 bp, Bacillus cereus
  source 1..2310: mol_type = genomic DNA
atgaaaaatatgaagaaaaagttagcaagtgttgtaacctgtaccttattagcccctatgttttttaatgggaatgtaaatactgcttacgcggacaacaaaatcaatcaggattcttcaaagcaggaataccaacagaaagagatggatcgaaaaggattgcttgggtattattttaaagataaagattttagtaaccttactatgttttcaccaacacgttataatacccttatttatgaccaacaaacagcgaataaattattagataaaaaacaacaagaatatcagtctattcgctggattggtttgattcagagtaacaaaacaggtgacttcacatttgaattatcagatgatgaatgtgcgattatagaaatggatgggaaagtgatttctaataaaggtaaagaaaagcaagttgtccatttagagaaaggaaaattagttccaattaaaattgagtatcaattagacgagccattaaatatcgatgatgaaaaattcaaagggtttaaattattgaaagtagataatcaaaaacaactacatcaagtacaacaagatgaattaagaaaccctgaatttaacaaaaaagagtcacaggaatttttagcgaaagcatcgaaaataaatctttttacgaaaaaaattaagagggacattgatgagggaacggatacagacggtgactctattccggatatgtgggaagaaaatgggtatacgattcaaaatagaatcgctgttaaatggaatgactcgctagcaagtaaagggtatacaaaatttgtttctaatccccttgacagtcacacagttggtgacccttatactgactatgaaaaagcatcgagagatttagatttgtcaaatgcaaaagaaacatttaacccattggtagctgcttttccaagcgtgaatgttagcatggaaaaggtgatattatctccaaataaaaacttatctaatagtgtagaatcgcactcatctacgaattggtcttataccaatactgaaggagcatctgttgaagctgggattgggcctaaaggtttttcttttggggtaagtgcaaactatcaacattctgaaacagttgcacaggaatggggggcatctataggagatactacgcaacttaatactgcgtcagcaggatatttaaatgcaaatgttcgatacaacaatgtgggaacaggagccatttatgatgtaaaacctacaactagctttgtattagaaaagaatacaatcgcaactattacggcaaaatcaaattcaacagctttaagtatatctccgggagaaagttatccgaaaaaaggccaaaatggaattgcgataacatccatggatgattttaactcacatccaattacattaaataaaaaacaattagatcaagtattgactaataaccctattatgttagaaacagaccagacagatgggatttataagataaaagatacacatggtaatattgtcacaggtggcacatggaatggtgtaactcaacaaattaaagcaaaaacagcgtctattattgtggatgacgggaaacaggtagcagaaaaacgtgtggcggcaaaagattatgcttatccagaagataaaacaccgtctttaactttaaaagatgcactgaagctttcattcccagaagagataaaagaaacagatggattattgtactataacaacaaaccaatttatgaatcgagtgtcatgacctaccttgatgggaatacggcaaaggaagtaaaaaaacaaataaatgataaaacaggggaatttaaggatgtccaacatttatatgctgttaaacttacacccaaaatgaattttactattaaagtaccggttgcgtatgatacagccaaacaggctgttaatcttggaggggataatccatggggggctaaaggattattagggacatgggtaaatgccatggttgtagataattccggagataaagcatataaaagggttgaacctggttatctactttcacctacattggagttttcagaaggttcattagacaatttaaagaaaaattatagtttttatgttagtatgtacgtgaaatcagataaaccatttactctaagaataaatgctggaccctatagtaccaagagaaccatagaagcatcaaatgattttaaacgcgttgatattcctgcgttttatatagaaggatttccgatagacactataagattagaaggttctgactatccatcggcaatatggtggaaagatgtttcaattacagaagtgtcagcagtaaaaaaataa

SEQ ID NO: 263 - DNA, 1389 bp, Bacillus cereus
  source 1..1389: mol_type = genomic DNA
atgaaaagaatggagggaaagttgtttatggtatctaaaaagttacaattagttactaaagctttattgtttagtacagttttatctatacctttattaaataatgaagaggtaaaagctgaacatttaaatctaaattctcaaagtaaatatcctagctttcaaaatcaaaaaatcactgataatgcagaggattttaaagaggataaggaaaaagcgaaagaatggggagaagtaaaagaaaaagagtggaaattaaccgctactgaaaaaagaaaaataaatgactttttaaatgatacaaacaaaataaaaacaaattataaagaaattactttttctatggcaggttcatttgaagatgaactgaaagatttaaaagaaattgataagatgtttgataaagccaatctctcaagttctattatcacctataaaaatgtggaacccgcaacaattggatttaataagtctttaacagaaggaaatacaattaattctgatgtaatggcgcagtttaaagaacaatttctaggaaaagatattaagtttgatagttatctagatactcatttaactgtccaacaagtttctagtaaagaaagagttattttgaaggttacagtgccgagtgggaagggttctactaatccaacaaaagcaggtgttattttagatggaaatgaacacaaaatgctcattgataatgggtatgtactccatgttgataaggtatcaaaggtagtaaaaaaggggctggagtgcttgcaagtggaagggaccttaaaaaagagtcttgactttaaaaatgatataagtgctaaagcgcatagttggggcatgaaaaattatgaagaatgggctgcaaatttaaccgattcccaaagaaaagctttagatggctatgctaggcaagattataaaaaaatcaatgattatttacgaaatcaaggcggaagtggaaatgaacaattggatgcacaaataaagaacatttctgaaactttaaacaataagccaataccagaaaatattactgtgtatagatggtgtggtatgccagaatttggttatcaaattagtgagcctttacctgccttaaaagattttgaatgggaatttttaaacacaatcaaggaagacaaaggatatattagtacgagcttatcaagtgaacgtctagcggcttttgggtcaagaaaaattatattacgattacaaatcccaaaaggaagtaaaggcgcatatttaagtgccattggtggatttgcaaatgaaaaagaaattcttctggataaagatagtaagtatcatatcaataaaataacagaagtagtcattaaaggcattaagcgatatgtagttgatgcaacattattaacaaattaa

SEQ ID NO: 264 - DNA, 1104 bp, Bacillus thuringiensis
  source 1..1104: mol_type = genomic DNA
atgaaaaatagattttcaaaagtggcattatgcaccgtaccgattttaatggtttctacattcgccagttcaagcatgtcagcttttgctgcagaagccaaatcaccagatttaaatgtatctcaacaagtaataggtccctatgccgaatcttatattgatattgtgcaggatagaatgaaacaaagggataagggatcaaaattaactggtaaaccaataaatatgcaagaacaaataatagatgggtggtttctagctagattttggatatttaaggatcaaaacaataaccatcagacaaatagatttatatcctggtttaaagataatattgctagttcaaaagggtataatagtattgcggagcaaatgggtttaaaaatagaagcagaaaacgatatggatgtaacaaatatagattatacatctaagacaggcgataccatttataatggtatttcagaattgaaaaattatacaggatcaactcaaaagatgaaaacagatagttttcaaagagattatacaaaatcagaatctacttcagtaactaatggattacaattaggatttaaagttgctgctaaaggagtagttgctttggctggggcagactttgaaaccagtgttacttataatctatcaactactacaactgaaacaaatacaatatcagacaagtttactgtcccatctcaagaagttacattgcctccaggacataaagcgatagtgaaacatgatttaagaaaaatggtttattctggtactcatgatctaaagggtgatttaattgtgagttttaatgataaagagattgtacaaaaatttatttatccaaattatagagaaattaatttatctgatatccgtgaaactatgattgaaattgatgaatggaatcatgtaaaccctgtgaatttttatgaattagttggggtcaaaaatcatataaaaaatggtgaaactttgtatatagatactccagctaaatttatgtttaatggtgctaatccatattatagagcaacatttacagaatacgacgggaataataatcctgttcaaacaaaggtattaagtgaaaactttaaattgtag

SEQ ID NO: 265 - DNA, 2862 bp, Spodoptera exigua
  source 1..2862: mol_type = genomic DNA
attgtgaagtgaaatgagatcataatatatttgtgtgtagcgatatttttattaagtagataaatttaaggaccataaatgaagaacctctaacaatttataatttgtgtaaaacataataaacagtttttaactgtgaatgtgcattaccgatttagtatgtgatttaaccccagtgataagagacttatcacttgctgttatttatataactttgatctgattacgaatcttaattaattacaaaatgtatatacatcgatcgactgtgttacgactgtgtgtgtgggtgagcctgttggctctatgtggggcccaacgcgcagagcaactcctggcacagaatccttgctccagcaagacgacgtgcagtgactgcatccgcacggccagctgcgcttggcgttttgcaggagagttcaatggccctcggtgcttcaaccctgccatggagcgagatggcactgcaggatgtgaagaatcctacatattcaacccagataataaacgctctgtcgaccccatgtacaatatggagttaagcagagctaagtctagaatgggcatgtctgctggttcatcttcttatgaagagtcttacagtgcacagggcagtagctttgctgcatcgggatcggcagcaggcgcaggcgctgaagcaggtggcgaaagattggtgcagatgaaacctcagaaagtgaatctcaacctcagaatgaatcaaatgcagaaacttacatttgcgtactccagagctcaagattatcctgttgacttatattaccttatggacttgagtagatctatgaaaaacgatagagagaaactcagtaccctgggaagtttactgtctgctaccatgaggaatatgacgtccatgttcaggatcgggttcggctcctttgtagataaactagtcatgccttatgtatctacagtgcctaagaatttgatatcaccttgcgacggttgcgcagcgccttatggataccaaaatcaaatgtctctgagtactgacaccgacttctttgagaaagcagtagctaacgcagacgtgccgggcaacttggacgcccccgaaggagggttcgacgcgatcatgcaagccgtggtgtgcaagcaacagatcggctggcgagaccaggctaggcgacttcttgttttctccacagacgctggtttccattatgctggcgacggaaagctcggtggtatcgtccaacctaacgatggcgaatgtcacatgaaggacaacacgtacacacactcgacgttgcaggattaccccagcatttcacagattaatcataaggtgaagaagcacgctatcaacgtaatctttgcggtaacggcggaacagatcagcgtgtacgaacagctgagcaagcacatcgaaggttccagtacgggagtgctgagcaacgattccgataacatcgtcgacctcgtccgggaacaatacaacaaaattacgtcaactgtagaaatgaaagactcatcgagtgacgctgtgcaaatagtgtattactcatcttgtctcagcggcaaagaactcacacagacgaacaaatgcgacggattaaaggttggcgatgtcgtggaattcacggctgagattacattgaaagaatgtcccaaagaccgcagcaagtggaagcagactttcgagatctcccccgtcggtatctctgacagcctcactgttgaactggaaatggtctgcgactgtccctgtgaacagcccaatcatcacgcgtacaacgacagtccgctagtatgcagcggcgagggcgtgtctgcgtgcggggtgtgcgtgtgccggccgggccgcttcggcaagaactgcgagtgctcggcgcacggcggcgtctccgccgagcaggagcgcggctgccgccccaccaacgccagcgccggcccgctctgctccaaccgcggcacctgcatctgcggcgtctgcgagtgcaacaagatggacgacccgctcaaggtgatttctggcccgttctgcgagtgcgataacttcacgtgtgacatgaacaaaggtttgctctgctcgggccccgaccacggggaatgtgtctgtggcaaatgtagctgtactcccgagtacaccggaccagcttgccagtgtttgaaggaccaaactccttgtcgatcacctgaaaataacgaaatatgtagcggtaacggaaaatgtgtctgcggtcagtgcgtgtgcaatgtagatgacgaccgtcattattccggaaaatactgtgaaaaatgtcccacctgcccaggccgctgtggtgaattcaaagactgtgtattatgcgaggtacacaaacgtggcccgctgtacaatgccgacacagacacctgtggcgactgtgcgctctatcccataatcgaagaaggcaaaattgaagccaacgaatctcgaaacgaacatttgtgtagtttctacgacgatgaagattgtttatatgtgtacgtgtactcctacaatgagaaccagcagcttgtcattagagcacagaaggaacgggaatgtcccaagaaggtaccaatcttgggaattgtgttgggagtgatcgctgcgatagtgttggttggtttggctttactgatgttatggaagatggcgactactatacacgaccgcagagagtttgcgcgcttcgagaaagaacgtatgatggccaaatgggacacgggcgagaaccctatttacaagcaagcaacatcgaccttcaaaaatcctacatatgctggaaaataattgtattacattacacaaaatagtcagcaaataaaatagtcgtctcaaaacgtaaagcaatcgaatgccgcatttataaaattatcaagatgtcagta

SEQ ID NO: 266 - DNA, 766 bp, Helicoverpa zea
  source 1..766: mol_type = genomic DNA
tgatttcgaattccatcgttcattccaagatgttcaatcaaactcagttgtttgtttttctcgctgtattcactacgagcagtgttttagggaataacaatgatgttaaggatggcgcagcgagtggagctcacagcgaccgactaggtctttggttcggtccccggctaggcaagcgctcgctcagaatatctaccgaagataacagacaagcattcttcaaattactcgaagccgccgacgctttgaaatactattacgaccagctaccttatgagatgcaagctgatgaacctgaaaccagggtcaccaagaaggtgatcttcacccccaagttaggcagaagcctcgcatacgatgacaaaagctttgagaacgtggagttcacgcccagactcggcaggagactgtccgatgatatgcctgccacccccgctgaccaggaaatgtaccgccaagaccctgaacagattgacagcaggacaaagtacttctccccaaggctcggcagaaccatgaacttctcaccacgactcggcagggaactgtcttatgatatgatgccaaataaaatcagggtagtcaggagtacaaacaaaacgcgatcaacataatttggagcaaaaacaagacgcaaagctagtctaacctcaaaatttttataaaacgtgttattttggacgaaataatgtactgttttgtataataagtattattaaataatattaaaaattagtattttgtcgaaataaaggacttaagatat

SEQ ID NO: 267 - DNA, 3468 bp, Bacillus thuringiensis
  source 1..3468: mol_type = genomic DNA
atggataacaatccgaacatcaatgaatgcattccttataattgtttaagtaaccctgaagtagaagtattaggtggagaaagaatagaaactggttacaccccaatcgatatttccttgtcgctaacgcaatttcttttgagtgaatttgttcccggtgctggatttgtgttaggactagttgatataatatggggaatttttggtccctctcaatgggacgcatttcttgtacaaattgaacagttaattaaccaaagaatagaagaattcgctaggaaccaagccatttctagattagaaggactaagcaatctttatcaaatttacgcagaatcttttagagagtgggaagcagatcctactaatccagcattaagagaagagatgcgtattcaattcaatgacatgaacagtgcccttacaaccgctattcctctttttgcagttcaaaattatcaagttcctcttttatcagtatatgttcaagctgcaaatttacatttatcagttttgagagatgtttcagtgtttggacaaaggtggggatttgatgccgcgactatcaatagtcgttataatgatttaactaggcttattggcaactatacagatcatgctgtacgctggtacaatacgggattagagcgtgtatggggaccggattctagagattggataagatataatcaatttagaagagaattaacactaactgtattagatatcgtttctctatttccgaactatgatagtagaacgtatccaattcgaacagtttcccaattaacaagagaaatttatacaaacccagtattagaaaattttgatggtagttttcgaggctcggctcagggcatagaaggaagtattaggagtccacatttgatggatatacttaacagtataaccatctatacggatgctcatagaggagaatattattggtcagggcatcaaataatggcttctcctgtagggttttcggggccagaattcacttttccgctatatggaactatgggaaatgcagctccacaacaacgtattgttgctcaactaggtcagggcgtgtatagaacattatcgtccactttatatagaagaccttttaatatagggataaataatcaacaactatctgttcttgacgggacagaatttgcttatggaacctcctcaaatttgccatccgctgtatacagaaaaagcggaacggtagattcgctggatgaaataccgccacagaataacaacgtgccacctaggcaaggatttagtcatcgattaagccatgtttcaatgtttcgttcaggctttagtaatagtagtgtaagtataataagagctcctatgttctcttggatacatcgtagtgctgaatttaataatataattccttcatcacaaattacacaaatacctttaacaaaatctactaatcttggctctggaacttctgtcgttaaaggaccaggatttacaggaggagatattcttcgaagaacttcacctggccagatttcaaccttaagagtaaatattactgcaccattatcacaaagatatcgggtaagaattcgctacgcttctaccacaaatttacaattccatacatcaattgacggaagacctattaatcaggggaatttttcagcaactatgagtagtgggagtaatttacagtccggaagctttaggactgtaggttttactactccgtttaacttttcaaatggatcaagtgtatttacgttaagtgctcatgtcttcaattcaggcaatgaagtttatatagatcgaattgaatttgttccggcagaagtaacctttgaggcagaatatgatttagaaagagcacaaaaggcggtgaatgagctgtttacttcttccaatcaaatcgggttaaaaacagatgtgacggattatcatattgatcaagtatccaatttagttgagtgtttatctgatgaattttgtctggatgaaaaaaaagaattgtccgagaaagtcaaacatgcgaagcgacttagtgatgagcggaatttacttcaagatccaaactttagagggatcaatagacaactagaccgtggctggagaggaagtacggatattaccatccaaggaggcgatgacgtattcaaagagaattacgttacgctattgggtacctttgatgagtgctatccaacgtatttatatcaaaaaatagatgagtcgaaattaaaagcctatacccgttaccaattaagagggtatatcgaagatagtcaagacttagaaatctatttaattcgctacaatgccaaacacgaaacagtaaatgtgccaggtacgggttccttatggccgctttcagccccaagtccaatcggaaaatgtgcccatcattcccatcatttctccttggacattgatgttggatgtacagacttaaatgaggacttaggtgtatgggtgatattcaagattaagacgcaagatggccatgcaagactaggaaatctagaatttctcgaagagaaaccattagtaggagaagcactagctcgtgtgaaaagagcggagaaaaaatggagagacaaacgtgaaaaattggaatgggaaacaaatattgtttataaagaggcaaaagaatctgtagatgctttatttgtaaactctcaatatgatagattacaagcggataccaacatcgcgatgattcatgcggcagataaacgcgttcatagcattcgagaagcttatctgcctgagctgtctgtgattccgggtgtcaatgcggctatttttgaagaattagaagggcgtattttcactgcattctccctatatgatgcgagaaatgtcattaaaaatggtgattttaataatggcttatcctgctggaacgtgaaagggcatgtagatgtagaagaacaaaacaaccaccgttcggtccttgttgttccggaatgggaagcagaagtgtcacaagaagttcgtgtctgtccgggtcgtggctatatccttcgtgtcacagcgtacaaggagggatatggagaaggttgcgtaaccattcatgagatcgagaacaatacagacgaactgaagtttagcaactgtgtagaagaggaagtatatccaaacaacacggtaacgtgtaatgattatactgcgactcaagaagaatatgagggtacgtacacttctcgtaatcgaggatatgacggagcctatgaaagcaattcttctgtaccagctgattatgcatcagcctatgaagaaaaagcatatacagatggacgaagagacaatccttgtgaatctaacagaggatatggggattacacaccactaccagctggctatgtgacaaaagaattagagtacttcccagaaaccgataaggtatggattgagatcggagaaacggaaggaacattcatcgtggacagcgtggaattacttctcatggaggaatag

SEQ ID NO: 268 - DNA, 3468 bp, Bacillus thuringiensis
  source 1..3468: mol_type = genomic DNA
atggataacaatccgaacatcaatgaatgcattccttataattgtttaagtaaccctgaagtagaagtattaggtggagaaagaatagagactggttacaccccaatcgatatttccttgtcgctaacgcaatttcttttgagtgaatttgttcccggtgctggatttgtgttaggactagttgatataatatggggaatttttggtccctctcaatgggacgcatttcttgtacaaattgaacagttaattaaccaaagaatagaagaattcgctaggaaccaagccatttctagattagaaggactaagcaatctttatcaaatttacgcagaatcttttagagagtgggaagcagatcctactaatccagcattaagagaagagatgcgtattcaattcaatgacatgaacagtgcccttacaaccgctattcctctttttgcagttcaaaattatcaagttcctcttttatcagtatatgttcaagctgcaaatttacatttaccagttttgagagatgtttcagtgtttggacaaaggtggggatttgatgccgcgactatcaatagtcgttataatgatttaactaggcttattggcaactatacagatcatgctgtacgctggtacaatacgggattagagcgtgtatggggaccggattctagagattggataagatataatcaatttagaagagaattaacactaactgtattagatatcgtttctctatttccgaactatgatagtagaacgtatccaattcgaacagtttcccaattaacaagagaaatttatacaaacccagtattagaaaattttgatggtagttttcgaggctcggctcagggcatagaaggaagtattaggagtccacatttgatggatatacttaacagtataaccatctatacggatgctcatagaggagaatattattggtcagggcatcaaataatggcttctcctgtagggttttcggggccagaattcacttttccgctatatggaactatgggaaatgcagctccacaacaacgtattgttgctcaactaggtcagggcgtgtatagaacattatcgtccactttatatagaagaccttttaatatagggataaataatcaacaactatctgttcttgacgggacagaatttgcttatggaacctcctcaaatttgccatccgctgtatacagaaaaagcggaacggtagattcgctggatgaaataccgccacagaataacaacgtgccacctaggcaaggatttagtcatcgattaagccatgtttcaatgtttcgttcaggctttagtaatagtagtgtaagtataataagagctcctatgttctcttggatacatcgtagtgctgaatttaataatataattccttcatcacaaattacacaaatacctttaacaaaatctactaatcttggctctggaacttctgtcgttaaaggaccaggatttacaggaggagatattcttcgaagaacttcacctggccagatttcaaccttaagagtaaatattactgcaccattatcacaaagatatcgggtaagaattcgctacgcttctaccacaaatttacaattccatacatcaattgacggaagacctattaatcaggggaatttttcagcaactatgagtagtgggagtaatttacagtccggaagctttaggactgtaggttttactactccgtttaacttttcaaatggatcaagtgtatttacgttaagtgctcatgtcttcaattcaggcaatgaagtttatatagatcgaattgaatttgttccggcagaagtaacctttgaggcagaatatgatttagaaagagcacaaaaggcggtgaatgagctgtttacttcttccaatcaaatcgggttaaaaacagatgtgacggattatcatattgatcaagtatccaatttagttgagtgtttatctgatgaattttgtctggatgaaaaaaaagaattgtccgagaaagtcaaacatgcgaagcgacttagtgatgagcggaatttacttcaagatccaaactttagagggatcaatagacaactagaccgtggctggagaggaagtacggatattaccatccaaggaggcgatgacgtattcaaagagaattacgttacgctattgggtacctttgatgagtgctatccaacgtatttatatcaaaaaatagatgagtcgaaattaaaagcctatacccgttaccaattaagagggtatatcgaagatagtcaagacatagaaatctatttaattcgctacaatgccaaacacgaaacagtaaatgtgccaggtacgggttccttatggccgctttcagccccaagtccaatcggaaaatgtgcccatcattcccatcatttctccttggacattgatgttggatgtacagacttaaatgaggacttaggtgtatgggtgatattcaagattaagacgcaagatggccatgcaagactaggaaatctagaatttctcgaagagaaaccattagtaggagaagcactagctcgtgtgaaaagagcggagaaaaaatggagaggcaaacgtgaaaaattggaatgggaaacaaatattgtttataaagaggcaaaagaatctgtagatgctttatttgtaaactctcaatatgatagattacaagcggataccaacatcgcgatgattcatgcggcagataaacgcgttcatagcattcgagaagcttatctgcctgagctgtctgtgattccgggtgtcaatgcggctatttttgaagaattagaagggcgtattttcactgcattctccctatatgatgcgagaaatgtcattaaaaatggtgattttaataatggcttatcctgctggaacgtgaaagggcatgtggatgtagaagaacaaaacaaccaccgttcggtccttgttgttccggaatgggaagcagaagtgtcacaagaagttcgtgtctgtccgggtcgtggctatatccttcgtgtcacagcgtacaaggagggatatggagaaggttgcgtaaccattcatgagatcgagaacaatacagacgaactgaagtttagcaactgtgtagaagaggaagtatatccaaacaacacggtaacgtgtaatgattatactgcgactcaagaagaatatgagggtacgtacacttctcgtaatcgaggatatgacggagcctatgaaagcaattcttctgtaccagctgattatgcatcagcctatgaagaaaaagcatatacagatggacgaagagacaatccttgtgaatctaacagaggatatggggattacacaccactaccagctggctatgtgacaaaagaattagagtacttcccagaaaccgataaggtatggattgagatcggagaaacggaaggaacattcattgtggatagcgtggaattacttcttatggaggaataa

SEQ ID NO: 269 - DNA, 3687 bp, Bacillus thuringiensis
  source 1..3687: mol_type = genomic DNA
atgacttcaaataggaaaaatgagaatgaaattataaatgctgtatcgaatcattccgcacaaatggatctattaccagatgctcgtattgaggatagcttgtgtatagccgaggggaacaatatcgatccatttgttagcgcatcaacagtccaaacgggtattaacatagctggtagaatactaggcgtattgggcgtaccgtttgctggacaactagctagtttttatagttttcttgttggtgaattatggccccgcggcagagatcagtgggaaattttcctagaacatgtcgaacaacttataaatcaacaaataacagaaaatgctaggaatacggctcttgctcgattacaaggtttaggagattccttcagagcctatcaacagtcacttgaagattggctagaaaaccgtgatgatgcaagaacgagaagtgttctttatacccaatatatagctttagaacttgattttcttaatgcgatgccgcttttcgcaattagaaaccaagaagttccattattgatggtatatgctcaagctgcaaatttacacctattattattgagagatgcctctctttttggtagtgaatttgggcttacatcgcaggaaattcaacgctattatgagcgccaagtggaacgaacgagagattattccgactattgcgtagaatggtataatacaggtctaaatagcttgagagggacaaatgccgcaagttgggtacggtataatcaattccgtagaggtctaacgttaggagtattaggtctagtggcactattcccaagctatgacactcgcacttatccaataaatacgagtgctcagttaacaagagaagtttatacagacgcaattggagcaacaggggtaaatatggcaagtatgaattggtataataataatgcaccttcgttctctgccatagaggctgcggctatccgaagcccgcatctacttgattttctagaacaacttacaatttttagcgcttcatcacgatggagtaatactaggcatatgacttattggcgggggcacacgattcaatctcggccaataggaggcggattaaatacctcaacgcatggggctaccaatacttctattaatcctgtaacattacggttcgcatctcgagacgtttataggactgaatcatatgcaggagtgcttctatggggaatttaccttgaacctattcatggtgtccctactgttaggtttaattttacgaaccctcagaatatttctgatagaggtaccgctaactatagtcaaccttatgagtcacctgggcttcaattaaaagattcagaaactgaattaccaccagaaacaacagaacgaccaaattatgaatcttacagtcacaggttatctcatataggtataattttacaatccagggtgaatgtaccggtatattcttggacgcatcgtagtgcagatcgtacgaatacgattggaccaaatagaatcacccaaatcccaatggtaaaagcatccgaacttcctcaaggtaccactgttgttagaggaccaggatttactggtggggatattcttcgaagaacgaatactggtggatttggaccgataagagtaactgttaacggaccattaacacaaagatatcgtataggattccgctatgcttcaactgtagattttgatttctttgcatcacgtggaggtactactgtaaataattttagattcctacgtacaatgaacagtggagacgaactaaaatacggaaattttgtgagacgtgcttttactacaccttttacttttacacaaattcaaaatataattcgaacgtctattcaaggccttagtggaaatggggaagtgtatatagataaaattgaaattattccagttactgcaaccttcgaagcagaatatgatttagaaagagcgcaagaggcggtgaatgctctgtttactaatacgaatccaagaagattgaaaacagatgtgacagattatcatattgatcaagtatccaatttagtggcgtgtctatcggatgaattctgcttggatgaaaagagagaattacttgagaaagtgaaatatgcgaaacgactcagtgatgaaagaaacttactccaagatccaaacttcacatccatcaataagcaaccagacttcatatctactaatgagcaatcgaatttcacatctatccatgaacaatctgaacatggatggtggggaagtgagaacattaccatccaggaaggaaatgacgtatctaaagagaattacgtcacactaccgggtacttttaatgagtgttatccgacgtatttatatcaaaaaataggggagtcggaattaaaagcttatactcgctaccaattagaaggttatattgaagatagtcaagatttagagatatatttgattcgttataatgcgaaacatgaaacattggatgttccaggtaccgagtccctatggccgctttcagttgaaagcccaatcggaaggtgcggagaaccgaatcgatgcgcaccacattttgaatggaatcctgatctagattgttcctgcagagatggagaaaaatgtgcgcatcattcccatcatttctctttggatattgatgttggatgcacagacttgcatgagaatctaggcgtgtgggtggtattcaagattaagacgcaggaaggtcatgcaagactagggaatctggaatttattgaagagaaaccattattaggagaagcactgtctcgtgtgaagagggcagagaaaaaatggagagacaaacgtgaaaaactacaattggaaacaaaacgagtatatacagaggcaaaagaagctgtggatgctttattcgtagattctcaatatgatagattacaagcggatacaaacatcggcatgattcatgcggcagataaacttgttcatcgaattcgagaggcgtatctttcagaattacctgttatcccaggtgtaaatgcggaaatttttgaagaattagaaggtcacattatcactgcaatctccttatacgatgcgagaaatgtcgttaaaaatggtgattttaataatggattaacatgttggaatgtaaaagggcatgtagatgtacaacagagccatcatcgttctgaccttgttatcccagaatgggaagcagaagtgtcacaagcagttcgcgtctgtccggggtgtggctatatccttagtgtcacagcgtacaaagagggatatggagagggctgcgtaacgatccatgaaatcgagaacaatacagacgaactaaaatttaaaaaccgtgaagaagaggaagtgtatccaacggatacaggaacgtgtaatgattatactgcacaccaaggtacagctggatgcgcagatgcatgtaattcccgtaatgctggatatgaggatgcatatgaagttgatactacagcatctgttaattacaaaccgacttatgaagaagaaacgtatacagatgtaagaagagataatcattgtgaatatgacagagggtatgtcaattatccaccagtaccagctggttatgtgacaaaagaattagaatacttcccagaaacagatacagtatggattgagattggagaaacggaaggaaagtttatggtagatagcgtggaattactcctcatggaagaatag

SEQ ID NO: 270 - DNA, 3531 bp, Bacillus thuringiensis
  source 1..3531: mol_type = genomic DNA
atggagaataatattcaaaatcaatgcgtaccttacaattgtttaagtaatcctgaggagatacttttagatggagaaagaatatcaactggtaattcatcaattgatatctctctgtcacttgtccagcttctggtatctaactttgtaccagggggaggatttttagttggattattagattttgtatggggaatagtaggcccttctccatgggatgcatttctagtgcaaattgaacaattaattaatgaaagaatagctgcatatgctaggtctgcagcaatttctaatttagaaggattaggaaacaatttcaatatatatgtggaagcatttaaagaatgggaagcagatcctgataatccagtaaccaggactagagtagttgatcgctttcgtatacttgatgggctacttgaaagggacatcccttcatttcgaattgctggatttgaagtaccccttttatccgtttatgctcaagcggccaatttgcatctagctatattaagagattcttcaatttttggagcaagatggggattgacaacaataaatgtcaatgaaaactataataggctaattaggcatattgatgaatatgctaatcactgtgcagatacgtataatcggggataaaataatttaccaaaatctacgtatcaagattggataacatataatcgattacggagagacttaacattaactgtattagatatcgctgctttctttccaagctatgacaataggagatatccaattcagtcagttggtcaactaacaagggaaatttatacggacccattaattacttttaatccacagttacagtctgtagctcaattacctacttttaacgttatggaaagcaacgcaattagaactcctcatttatttgatgtattgaataatcttacaatttttacagattggtttagtgttggacgcaacttttattggggaggacatcgagtaatatctaaccgtataggaggaggtaacataacatctcctatatatggaagagaggcgaatcaggagcctccaagatcttttacttttaatgggcctgtttttaggactttatcaaatcctacttttagacctttacagcaaccttggccagcgccaccatttaatttacgtggtgttgaaggagtagaattttctacacctttaaatagctttacgtatcgaggaagaggtacggttgattctttaactgagttaccgcctgaggataatagtgtgcctcctcgcgaaggatatagtcatcgtttatgtcatgcaacttttgttcaaagatctggaaccccatttttaacaactggtccagtattttcttggacgcatcgtagtgctactgatcgaaatataatctacccggatgtaattaaccaaataccgttagtaaaagcattcaaccttacttcaggtacctctgtagtcagaggtccaggatttacaggaggggatatcatccgaactaacgttaatggtagtgtactaagtatgagtcttaattttagtaacacaacattacagcagtatcgtgtgtgagttcgttatgctgcttctcaaacaatggtcatgagcgtaactgttggagggagtactactggtaatcaaggattccctagtactatgagtgcaaatggggctttgacatctcaatcatttagattcgcagaatttcctgtaggtattagtgcatctggcagtcaaggtgcatcaataagtattagtaataatgtaggtagacaaatgtttcacttagatagaattgaatttctcccagttacttctacatttgaggaggaatatgatttagaaagagcgcaagaggcggtgaatgccctgtttacttctacgaaccaactagggctaaaaacagatgtaacggattatcatattgatcaagtatcaaatctagttgaatgcttatcggatgaattttgtctggatgaaaagcgagaattgtctgagaaagtcaaacatgcgaagcgactcagcgatgagcgcaatttactccaggatcgaaatttcagatccattaatgggcaactaggccgtggctggagaggaagtacggatattaccatccaaggtggagatgacgtattcaaagagaattacgtcacactgccgggtacctttgatgagtgctatccaacgtatctatatcaaaaaatagatgaatcgaaattaaaatcctatacacgttacgagttaagagggtatatcgaggatagtcaagatttagaaatctatttgattcgctacaatgcaaaacacgaaatagtaaatgtaccaggtacagggagtttatggcctctttctatagaaaattcaattgggccttgtggagaaccgaatcgctgcgcgccacaccttgaatggaatcctaatctagattgttcctgcagggacggggaaaaatgtgcccatcattcccatcatttctccttggacattgatgttggatgtacagacttaaatgaggacttaggtgtatgggtgatcttcaagattaagacgcaagatggccatgcaagactaggaaatctagagtttctcgaagagaaaccactattaggggaagcactagctcgtgtgaaaagagcggagaagaaatggagagacaaacgtgaaaaattggaatgggaaacaaatattgtttataaagaggcaaaagaatctgtagatgctttatttgtgaactctcaatatgatagattacaagcggatacgaatatcgcgatgattcatgcggcagataaacgcgttcatagaattagagaagcataccttccagaattatctgtaattccgggtgtaaatgcgggcattttcgaagaattagagggacgcattttcacagcctactctctatatgatgcgagaaatgtcattaaaaatggcgatttcaataatggtttattatgctggaacttgaaagggcatgtagatgtagaagaacaaaacaaccatcgttcagtccttgttgtcccggaatgggaagcggaggtgtcccaagaagttcgtgtctgtccaggtcgtggctatatccttcgtgttacagcgtacaaagagggatatggagagggctgcgtaaccattcatgagatcgaagacaatacagacgaactgaaatttagcaactgtgttgaagaggaagtatatccaaacaacacggtaacgtgtaatgattatactgcgactcaagaagaatacgggggtgcgtacacttcccgtaatcatggatatggcaaatcttatgaaagtaattcttccgtacaagctgattatgcgtcagtttatgaagaaaaagcggacacagatggacgaagagataatcattgcgaatctaacagagggtatggggattacacgccactaccagctggttatgtaacaaaagaattagaatacttcccagaaaccgataaggtatgggttgagattggagaaacggaaggaacattcattgtggatagtgtggaattactccttatggaggaataa

SEQ ID NO: 271 - DNA, 8373 bp, Bacillus thuringiensis
  source 1..8373: mol_type = genomic DNA
tgaaaaataaatttattatttgagaaataaaatcacttgaactcttgtcgcaaatgctaaagcctgagaattggatactatcagaaaacatgcaaatgaaaggtgaaggactcatagagattttgggaaatagttattttaaacaattcattaaattggaagatgattcaacctattttctaagactatctttcaagggaacaggtagggtacccatgattgatgaatctagttatttagttttcgcaaatgttaaggatgaaaattttactagagttattaaaaaatttgtcttcaaagggtgagtgttttattggtatttatggtacctatgtagaaaatgcaagtattatttttctaatgtatttattgttaaagagtagaaaagatataatatttaattatacaaaaattaatagaataccttttgaaagtaatattattccaaaaggaaaaagtttttttatttgtacacgctgataaaagaaagatttcttataatattgcattcagttatcatcgagataaacttgaatcattacttttagaaaagttagctccccggtccttattctccatgtaattaaggtcttgaactatccccactttcacttcgtttagaagtgagggattcctaagtaaagagttctatcgaactctaattgattaggctaaccccgcagtccttgcggttagaagccttattgcttcattctttagattgatactcgcgttaatatccctatcatggtttgtacgacaagaaggacagtcccattcacgtaggtttagatttttaacgtctttattttgatatccacaacaagaacgtaattggctggaagcaaatgttttcgatacgacaatgacttgtttgccataccattttgctttgtattctaacatgaatcgaaattgcgaccaagatacctcaataattgcttttgctaacttatgattttttaacatattcgatacttgcaaatcctctataccgataacatcgtggtttttgatgatttcagttgaaattttgtccaagtaatcttttctagtatttgatatgaattctagctatctttactctttgtttattccagcgagaagatcctttcattcttctagaaagaacacgctgtgttttcggaagttcttgtacttctgtttcaactaatagtgacacaaaatatctaccagaaggggttcgtctaacagtcgcatttacaatacgcccctctacttcgcgacttttagcaaatcgaacaaggcctagtttcggtaactttattttgttccctacaacggcaatgttttcatttgtttgttttgtggtataagattgtacgttgttcttcttagatttaaaacgcggtgcgctgttttgttttttgaaaagcgtgtataagcatccgcaaggttgcgaacagacgactgaatcgcaatactatccacttcttttagccaaacaagctctttcttcatggcaggtagtttggcagagaatgtaccataggtcaagccttttcctgtctctttgtatacttgatcccataaggataggaaatgattgaatacaaagcgagaacacccaatcgttttgttgattagaattgcttgtgcctgatttggatagatacgaaacttataggctttattcatcattatgtaattcacctccatttcggtatatgactattatacaccgaacatacattcgatagatagtggagtaacactttctgtatatctaacaattaagatggcttcctgccatcccttgttcgaattcatctcccacctactcactgggctgtggcccttcacgctccttgaggaaggagtcttcttggctaaaataataaatagatctgttttaatataagggatttgtgcccttctcgttatattcttttattagccccaaaaactagtgcaactaaatatttttataattacactgattaaatactttatttttgggagtaagatttatgctgaaatgtaataaaattcgttccattttctgtattttctcataaaatgtttcatatgctttaaattgtagtaaagaaaaacagtacaaacttaaaaggactttagtaatttaataaaaaaaggggatagtttatggaaataaataatcaaaaccaatgtgtgccttacaattgtttaagtaatcctaaggagataatattaggcgaggaaaggctagaaacagggaatactgtagcagacatttcattagggcttattaattttctatattctaattttgtaccaggaggaggatttatagtaggtttactagaattaatatggggatttatagggccttcgcaatgggatatttttttagctcaaattgagcaattgattagtcaaagaatagaagaatttgctaggaatcaggcaatttcaagattggaggggctaagcaatctttataaggtctatgttagagcgtttagcgactgggagaaagatcctactaatcctgctttaagggaagaaatgcgtatacaatttaatgacatgaatagtgctctcataacggctattccactttttagagttcaaaattatgaagttgctcttttatctgtatatgttcaagccgcaaacttacatttatctattttaagggatgtttcagttttcggagaaagatggggatatgatacagcgactatcaataatcgctatagtgatctgactagccttattcatgtttatactaaccattgtgtggatacgtataatcagggattaaggcgtttggaaggtcgttttcttagcgattggattgtatataatcgtttccggagacaattgacaatttcagtattagatattgttgcgttttttccaaattatgatattagaacatatccaattcaaacagctactcagctaacgagggaagtctatctggatttaccttttattaatgaaaatctttctcctgcagcaagctatccaaccttttcagctgctgaaagtgctataattagaagtcctcatttagtagactttttaaatagctttaccatttatacagatagtctggcacgttatgcatattggggagggcacttggtaaattctttccgcacaggaaccactactaatttgataagatcccctttatatggaagggaaggaaatacagagcgccccgtaactattaccgcatcacctagcgtaccaatatttagaacactttcatatattacaggccttgacaattcaaatcctgtagctggaatcgagggagtggaattccaaaatactataagtagaagtatctatcgtaaaagcggtccaatagattcttttagtgaattaccacctcaagatgccagcgtatctcctgcaattgggtatagtcaccgtttatgccatgcaacatttttagaacggattagtggaccaagaatagcaggcaccgtattttcttggacacaccgtagtgccagccctactaatgaagtaagtccatctagaattacacaaattccatgggtaaaggcgcatactcttgcatctggtgcctccgtcattaaaggtcctggatttacaggtggagatattctgactaggaatagtatgggcgagctggggaccttacgagtaaccttcacaggaagattaccacaaagttattatatacgtttccgttatgcttcggtagcaaataggagtggtacatttagatattcacagccaccttcgtatggaatttcatttccaaaaactatggacgcaggtgaaccactaacatctcgttcgttcgctcatacaacactcttcactccaataaccttttcacgagctcaagaagaatttgatctatacatccaatcgggtgtttatatagatcgaattgaatttataccggttactgcaacatttgaggcagaatatgatttagaaagagcgcaaaaggtggtgaatgccctgtttacgtctacaaaccaactagggctaaaaacagatgtgacggattatcatattgatcaggtatccaatctagttgcgtgtttatcggatgaattttgtctggatgaaaagagagaattgtccgagaaagttaaacatgcaaagcgactcagtgatgagcggaatttacttcaagatccaaacttcagagggatcaataggcaaccagaccgtggctggagaggaagtacggatattactatccaaggaggagatgacgtattcaaagagaattacgttacgctaccgggtacctttgatgagtgctatccaacgtatttatatcaaaaaatagatgagtcgaaattaaaagcctatacccgttatcaattaagagggtatatcgaagatagtcaagacttagaaatctatttaattcgttacaatgcaaaacacgaaatagtaaatgtaccaggtacaggaagtttatggcctctttctgtagaaaatcaaattggaccttgtggagaaccgaatcgatgcgcgccacaccttgaatggaatcctgatttacactgttcctgcagagacggggaaaaatgtgcacatcattctcatcatttctctttggacattgatgttggatgtacagacttaaatgaggacttaggtgtatgggtgatattcaagattaagacgcaagatggccacgcacgactagggaatctagagtttctcgaagagaaaccattattaggagaagcactagctcgtgtgaaaagagcggagaaaaaatggagagacaaacgcgaaacattacaattggaaacaactatcgtttataaagaggcaaaagaatctgtagatgctttatttgtaaactctcaatatgatagattacaagcggatacgaacatcgcgatgattcatgcggcagataaacgcgttcatagaattcgagaagcgtatctgccggagctgtctgtgattccgggtgtcaatgcggctatttttgaagaattagaagagcgtattttcactgcattttccctatatgatgcgagaaatattattaaaaatggcgatttcaataatggcttattatgctggaacgtgaaagggcatgtagaggtagaagaacaaaacaatcaccgttcagtcctggttatcccagaatgggaggcagaagtgtcacaagaggttcgtgtctgtccaggtcgtggctatatccttcgtgttacagcgtacaaagagggatatggagaaggttgcgtaacgatccatgagatcgagaacaatacagacgaactgaaattcaacaactgtgtagaagaggaagtatatccaaacaacacggtaacgtgtattaattatactgcgactcaagaagaatatgagggtacgtacacttctcgtaatcgaggatatgacgaagcctatggtaataacccttccgtaccagctgattatgcgtcagtctatgaagaaaaatcgtatacagatagacgaagagagaatccttgtgaatctaacagaggatatggagattacacaccactaccagctggttatgtaacaaaggaattagagtacttcccagagaccgataaggtatggattgagattggagaaacagaaggaacattcatcgtggacagcgtggaattactccttatggaggaataggaccatcccgagtatagcagttttaataaatattaattaaaatagtagtctaacttccgttccaattaaataagtaaattacagttgtaaaaaaaaacggacattactcttcaaagagcgatgtccgttttttatatggtgtgtgctaatgataagtgcgcacgaaattttattgtcaaaatagtatttacttgagaaaaagatcatgttatgtagagatattcccttataatacttgttccacattcataatttttggatgatacattacaacaaaaacagtcgcaaatttatattttctgcataaaatatatagttaagaacctaagaagagaatcaagtagtaggataaaactgaataaggaagtgtagctacaatgaataaaaaaataagaaatgaagatgagcattcatcgatagaattatcatatagtaattcaaaaaatcaaaagcataaggtaccattttgttgtaccatttcaattcctaaaggatgggaagttatatcagaatgccagcccaaaatcgtctatcaacttgattgtctgtctattataaaagaaacgtgtcgcaaagtggttgaggtaaaagattgtggtcaaacggaaatcgatgttaatgtgttaaaaataaaaggatgtatctcttttctgattaatatagaggtgaggccaaaggatgaacgatgtgtttgcttcacagattcccaaaatcaagacatagcattgtgttgtaaagataccgtatgtgtagatcatgtacttcaatgtagtgtggggcatttaccacctcttcatttaaattgtcacaatgtaacagtctgtgatgtaaaagtggtaccggtctgcgatgcggcctgtcaattcgtgaaagtgacagggggttttcaatttcatcctcacttttaaatatcgaggttccgactcccttgtatattgatgattttctcataaaaagtgactataaatataatgttaaagtttgtatatttaatatatttgcagtgggaatggaaaaggggggctttatcatcctttatagcttgtggaaagaggcgaatttaatgggaaattggtttttatttgaagtcctcgatatatgaaacccttcatgtgaatttttaaaaccgtaaccacatttaagaaaaagaaaaatgtttaaactttcatcactataacattaatatttaaatgaagtgggatatattatgcgaaacttcagatagagatagaaaatgaataactaaaaaaattcttacaagatatcattattttaatttgattattgtttctattctgcttattttatgttaaatttaatatgtacatgtaaaatggtttgaaatttagtatgattacatgcaggaaaagagtacgttcgaaaaagaacgtactcttttatatttaccttgattatcttaaaaatataatcatcatttttattaggtataaatttgatatgaaacacatacattcttaaaagtacttgttttttaatagagcaatatagtttgaactatttatttacggtatataaagctgcacgcctacactatacaggatgtatgaaaaaagttttaaaatccacagatatagcaaagtgctcatttgccatatctgtggattttaaaacataggttatgttacaaaaacattataagagattaaccgtcaaagatgtgaaccagatataagccagctagtttttttacgaatgtagtatacccaaacaatttataagacatatgtatacaaaccttaaattcaaagatttattctcaggaactctaaagtatggatgaaagagaaataagccctggttatttaaacggtgaaggaagttcaatatgataaaggaaaatatcagattagaggctctacacaactaaaaaatttggtgaaaaaatataaagaatttagtggaattacagatacttgtgggaaaaatggtggaatgaaaggtgtatcaaattggttaaaagagaaatatccagttatatggtttacgaaatttgcgggtgtacatcgttgaagtattcataccaaaggtatgaaaaatatacggctagaactcgaaaaatgattaaaaaagtaagatctattcacgtaaagcacaaagaatttggttatccacatatgaaaatccctttacaggaagagggatattttataaatcacaagaaagtatatcgcttaaagatggggctaaacatccaatctattattcgaaagaagcgttgcttctttaaagggaactattccaaattttttctgaatgttttaaatcgtgagtttaaagatcgccaacaaaatgaggcacttgttacagatattacttacctacaattccaagaggaatttcggtatctttctgttgtacaaggtgtttataataacgcaggtgtttcttggaaaatatctacgcgtaatgataatgaacttgtattagatacgattgaaatattggcacaaaaaagagacgtgcgtggaaccattctccattcagatcaaggattccagtacacatctcatgcctacaacaaacgactttccgatttaagtatcattggtaactactcccgcaaaggaaactgccataataacgtttgtatcgagtcatttttctcccatttcaaatcggagatgttgtatttgaatcattttaaaacagaagaaaatttaatacaagccaatgaaaaatatatttacttttataactatagacggttcaaaaaacgactcaaccatc

SEQ ID NO: 272 - DNA, 3516 bp, Bacillus thuringiensis
  source 1..3516: mol_type = genomic DNA
atggagatagtgaataatcagaatcaatgcgtgccttataattgtttaaataatcctgaaaatgagatattagatattgaaaggtcaaatagtactgtagcaacaaacatcgccttggagattagtcgtctgctcgcttccgcaactccaataggggggattttattaggattgtttgatgcaatatgggggtctataggcccttcacaatgggatttatttttagagcaaattgagctattgattgaccaaaaaatagaggaattcgctagaaaccaggcaatttctagattagaagggataagcagtctgtacggaatttatacagaagcttttagagagtgggaagcagatcctactaatccagcattaaaagaagagatgcgtactcaatttaatgacatgaacagtattcttgtaacagctattcctcttttttcagttcaaaattatcaagtcccatttttatcagtatatgttcaagctgcaaatttacatttatcggttttgagagatgtttcagtgtttgggcaggcttggggatttgatatagcaacaataaatagtcgttataatgatctgactagacttattcctatatatacagattatgctgtacgctggtacaatacgggattagatcgcttaccacgaactggtgggctgcgaaactgggcaagatttaatcagtttagaagagagttaacaatatcagtattagatattatttcttttttcagaaattacgattctagattatatccaattccaacaagctcccaattaacgcgggaagtatatacagatccggtaattaatataactgactatagagttggccccagcttcgagaatattgagaactcagccattagaagcccccaccttatggacttcttaaataatttgaccattgatacggatttgattagaggtgttcactattgggcagggcatcgtgtaacttctcattttacaggtagttctcaagtgataacaacccctcaatatgggataaccgcaaatgcggaaccaagacgaactattgctcctagtacttttccaggtcttaacctattttatagaacattatcaaatcctttcttccgaagatcagaaaatattactcctaccttagggataaatgtagtacagggagtagggttcattcaaccaaataatgctgaagttctatatagaagtagggggacagtagattctcttaatgagttaccaattgatggtgagaattcattagttggatatagtcatcgattaagtcatgttacactaaccaggtcgttatataatactaatataactagcctgccaacatttgtttggacacatcacagtgctactaatacaaatacaattaatccagatattattacacaaatacctttagtgaaaggatttagacttggtggtggcacctctgtcattaaaggaccaggatttacaggaggggatatccttcgaagaaataccattggtgagtttgtgtctttacaagtcaatattaactcaccaattacccaaagataccgtttaagatttcgttatgcttccagtagggatgcacgaattactgtagcgataggaggacaaattagagtagatatgacccttgaaaaaaccatggaaattggggagagcttaacatctagaacatttagctataccaattttagtaatcctttttcatttagggctaatccagatataattagaatagctgaagaacttcctattcgtggtggtgagctttatatagataaaattgaacttattctagcagatgcaacatttgaagaagaatatgatttggaaagagcacagaaggcggtgaatgccctgtttacttctacaaatcaactagggctaaaaacagatgtgacggattatcatattgatcaagtttccaatttagttgagtgtttatcggatgaattttgtctggatgaaaagagagaattatccgagaaagtcaaacatgcgaagcgactcagtgatgaacggaatttacttcaagatccaaacttcagagggatcaataggcaaccagaccgtggctggagaggaagcacggatattactatccaaggtggagatgacgtattcaaagagaattacgtcacattaccgggtacctttgatgagtgctatccaacgtatttatatcaaaaaatagatgagtcgaagttaaaagcttatacccgctatgaattaagagggtatatcgaggatagtcaagacttagaaatctatttaattcgctacaatgcaaaacacgagacagtaaacgtgccaggtacgggttccttatggccgctttcagcccaaagtccaatcggaaagtgtggagaaccgaatcgatgcgcgccacaccttgaatggaatcctaatctagattgctcctgcagagacggggaaaaatgtgcccatcattcccatcatttctccttggacattgatgttggatgtacagacttaaatgaggacttaggtgtatgggtgatattcaagattaagacacaagatggctatgcaagactaggaaatctagagtttctcgaagagaaaccactattaggggaagcactagctcgtgtgaaaagagcggagaaaaaatggagagacaaatgcgaaaaattggaatgggaaacaaatattgtttataaagaggcaaaagaatctgtagatgctttatttgtaaactctcaatatgatagattacaagcggatacgaatatcgcgatgattcatgcggcagataaacgcgttcatagcattcgagaagcgtatctgccagagctgtctgtgattccgggtgtcaatgcggctatttttgaagaattagaagggcgtattttcactgcattctccctatatgatgcgagaaatgtcattaaaaatggcgatttcaataatggcttatcatgctggaacgtgaaagggcatgtagatgtagaagaacagaacaaccatcgttcggtccttgttgttccagaatgggaagcagaagtgtcacaagaagttcgtgtttgtccgggtcgtggctatatccttcgtgttacagcgtacaaagagggatatggagagggctgtgtaacgattcatgagatcgaagacaatacagacgaactgaaattcagcaactgtgtagaagaggaagtatatccaaacaacacggtaacgtgtaataattatactgcgactcaagaagaacatgagggtacgtacacttcccgtaatcgaggatatgacgaagcctatgaaagcaattcttctgtacatgcgtcagtctatgaagaaaaatcgtatacagatagacgaagagagaatccttgtgaatctaacagaggatatggggattacacaccactaccagctggctatgtgacaaaagaattagagtacttcccagaaaccgataaggtatggattgagatcggagaaacggaaggaacattcatcgtggacagcgtggaattacttcttatggaggaataa

SEQ ID NO: 273 - DNA, 3525 bp, Bacillus thuringiensis
  source 1..3525: mol_type = genomic DNA
atggagaataatattcaaaatcaatgcgtaccttacaattgtttaagtaatcctgaagtagaaatattaagtgaagaaagaagtactggcagattaccgttagatatatccttgtcgcttacacgtttccttttgagtgaatttgttccaggtgtgggagttgcgtttggattatttgatttaatatggggttttataactccttctgaatggagtttatttcttttacagattgaacaactgattgaacaaagaattgaaacattggaaaggaaccgggcaattactacattacgagggttagcggatagctatgaagtttaccttgaggcactaagagagtgggaagaaaatcctaataatgcacaattaagggaagatgtgcgtattcgatttgctaatacagacgacgctttaataacagcaataaataattttacacttacaagttttgaaatccctcttttatcggtctatgttcaagcggcgaatctacatttatcactattaagagatgctgtatcgtttgggcagggttgggggctggatatagctactgttaataatcattataataggttaataaatcttattcatagatatacggaacattgtttggacacatacaatcaaggattagaaaacttaagaggtactaatactcgacaatggtcaagattcaatcagtttaggagagagttaacattgactgtattagatatcgttgctctttttccgaactacgatgctggagcatatccaattcaaacgtcatcccaattaacaagggaaatttatacaagttcagtaattgaagattctccagtttctgctaatatacctaatggttttaatagagcggaatttggagttagaccgccccatcttatggactttatgaattctttgtttgtaactgcagagactgttagaagtcaaactgtgtggggaggacacttagttagttcacgaaatacggctggtaaccctataaatttccctatttatgggatcttcaatcctggtggcgccatttggattgcagatgaggatccacgtcctttttatcggacattatcagatcctgtttttgtccgaggaggatttgggaatcctcattatgtacttgggcttaggggagtagcatttcaacaaactggtacgaaccacacccgaacatttagaaatagtgggaccatagattctctagatgaaatcccacctcaggataatagtggggcaccttggaatgattatagtcatgtattaaatcatgttacatttgtaaggtggcctggtgagattgcaggaagtgattcatggagagcgccaatgttttcttggacacaccgtagtgcagatcgtacaaatatcattaatccaaatataattacacaaatacctgctgtaaaagcacacaatcttcattcgggttctacggttgttagaggacccgggtttacaggtggtgatctcttacgaagaacgaatactggtacatttgcagatataagagtaaatattactgggccattatctcaaagatatcgtgtaagaattcgctatgcttctacgacagatttacaatttttcacgagaatcaatggaacttctgtaaatcaaggtaatttccaaagaactatgaatagagggggtaatttagagtctggaaactttaggactgcaggatttagtacgccttttagtttttcaaatgcgcaaagtacattcacattgggtactcaggctttttcaaatcaggaagtttatatagatcgaattgaatttgtcccggcagaagtaacattcgaggcagaatctgatttagaaagagcgcaaaaggcggtgaatgccctgtttacttctacaagccaactagggctaaaaacaaatgtaacgggttaccatattgatcaagtgtccaatttagttgcgtgtttatcggatgaattttgtctggatgaaaagagagaattgtccgagaaagttaaacatgcgaagcgactcagtgataagcggaatttacttcaagatccaaacttcagagggatcagtaggcaaccagaccatggctggagaggaagtacggatattactatccaaggaggagatgacgtattcaaagagaattacgttacgctaccgggtacttttgatgagtgctatccaacgtatttatatcaaaaaatagatgagtcgaaattaaaagcctatacccgttatcaattaagagggtatatcgaagatagtcaagacttagaaatctatttaattcgttacaattcaaaacacgaaatagtaaatgtaccaggtacagggagtttatggcctctttctgtagaaaatcaaattggaccttgtggagaaccgaatcgatgcgcgccacaccttgaatggaatcctgatttacactgttcctgcagagacggggaaaaatgtgtgcatcattctcatcatttctctttggacattgatgtcggatgtacagatttaaatgaggacctaggtgtatggttgatattcaagattaagacgcaagatggccacgcaagactagggaatctagagtttctcgaagaggaaccgttattaggcgaagcgttagcacgtgtgaagagagcggagaagaagtggagagacaaacgcgagaaactgcagttggaaacaaatattgtctataaagaggcaaaagaatctgtagatgctttatttgtaaactctcaatatgatagattacaagcggatacgaacatcgcgatgattcatgcggcagataaacgcgttcatagaatccgggaagcgtatctgccagagttgtctgtgattccaggtgtcaatgcggccattttcgaagaattagagggacgtatttttacagcgtattccttatatgatgcgagaaatgttattaaaaatggcaatttcaataatggcttattatgctggaacgtgaaagggcatgtagatgtagaagagcaaaacaaccaccgttcggtccttgttatcccagaatgggaagcagaagtgtcacaaaaagttcgtgtctgtccaggtcgtggttatatccttcgtgttacagcgtacaaagagggatatggagaaggtagcgtaacgatccatgagatcgaagacaatacagacgaattaaagtttagcaactgtgtagaagaaggatatccaaacaacacggtaacgtgtaatgagtatactatgaatcaaggggtaggagagtgtacggatgcatgtaatgtccgtaatcgtggatatgaggatgcatatggacacaatccttcaacgcctgttcattacacaacgccgtacgaagaagaaacgtatacagatgaacgaagagagaatccttgtgaagctaacaaagggtatgtgaattacacgccactaccagttggttatgtaacaaaagaattagaatacttcccagaaaccgataaggtatgggttgagattggagaaacggaaggaacattcattgtggatagtgtggaattactccttatggaggaataa

SEQ ID NO: 274 - DNA, 2920 bp, Bacillus thuringiensis
  source 1..2920: mol_type = genomic DNA
atcgatgaaaatatctctgctttttctttctttatttggtatatgctttacttgtaatcgaaaataaagcactaataagagtatttataggtgtttgaagtcatttcagttcatttttaaaggaggtttaaaagtgttagaaagttattaaggaataatacttacagtaaatcctacctatattttacaattaattatgatatttatgcataaattaaaaatgctttatttgacattacagctaagtataattttttatgaataaaattttatttgaaaattaaataatattatatgtgagggattaatatgaaactaaagaatccagataagcatcaaagcttgtctagcaatgcgaaagtagataaaatcgctacggattcactaaaaaatgaaacagatatagaattgaaaaatattaatcatgaggatttcctaagaatgtctgagcatgagagtattgatccgtttgttagtgcatcaacaattcaaacgggtattggaattgctggtaagattcttggtactctaggtgttccttttgctggacaaatagctagcctctatagttttatcttaggcgagctttggcctaaagggaaaagtcaatgggaaatctttatggaacatgtagaagagcttattgaccaaaaaatatcaacttacgcaagaaacatagcacttgcagatttaaaaggcttaggagatgctttggctgtctaccatgaatcgcttgaaagttggattaaaaatcgcaacaacgcaagggctacaagtgttgtcaagagccaatatattgctttagaactattgtttgttcaaaagctgccttcttttgcagtatcaggtgaggaagtaccattattgccaatatatgcacaagctgcaaatttacacttattattactaagagatgcttctgtttttggaaaagagtggggattatctaattcgcaaatttctacattttataatcgtcaagtcgaaagaacgagtgactattccgaccattgtgtgaaatggtatagtacaggtctaaataacttgagaggtacaaatgccgaaagctgggtccgttataatcaatttcgtaaagatatgacattaatggtactagatttaatcgcattattcccaagctatgatacacttgtatatccaattaaaaccacttctcaacttacaagagaagtatatacagacgcaattgggacagtacatccaaatgcaagttttgcaagtacgacctggtataataataatgcaccttcgttctctgccatagagtctgctgttgttcgaaacccgcatctactcgattttttagaacaagttacaatttacagcttattaagtaggtggagtaacactcagtatatgaatatgtggggaggacatagactggaattccgaacaataggtggagtgttaaatacctcaacacaagggtctactaatacttctattaatcctgtaacattaccgttcacgtctcgagacgtctataggactgaatcattggcagggctgaatctatttttaactcaacctgttaatggagtacctagggttgattttcattggaaattcgccacacttccgattgcatctgataatttttattatctagggtatgctggagttggtacgcaattacaagattcagaaaatgaattaccacctgaaacaacaggacagccaaattatgaatcatatagtcatagattatcccatataggactcatttcagcatcccacgtgaaagcattggtatattcttggacacatcgtagtgcagatcgtacaaatacaattgagccaaatagcattacacaaataccattagtaaaagcgttcaatctgtcttcaggtgccgctgtagtgagaggaccaggatttacaggtggggatatccttcgaagaacgaatactggtacatttggggatatacgagtaaatattaatccaccatttgcacaaagatatcgcgtgaggattcgctatgcttctactacagatttacaattccatacgtcaattaacggtaaagctattaatcaaggtaatttttcagcaactatgaatagaggagaggacttagactataaaacctttagaactgtaggctttaccactccatttagcttttcagatgtacaaagtacattcacaataggtgcttggaacttctcttcaggtaacgaagtttatatagatcgaattgaatttgttccggtagaagtaacatatgaggcagaatatgattttgaaaaagcgcaagagaaggttactgcactgtttacatctacgaatccaagaggattaaaaacagatgtaaaggattatcatattgaccaggtatcaaatttagtagagtctctatcagatgaattctatcttgatgaaaagagagaattattcgagatagttaaatacgcgaagcaaatccatattgagcgtaacatgtagaattaaaatctacctaaatccagaaaaataaaagggttaaatatacaattcttgtaccaatattttgagtgattagatgtaggatgaaatttaattgtatgctatttaacagtagagatattaaaaattaatttatctatacattaatagtatagacatacaaacataagagagcattgtcttttcgtaggctacaatgctctctatttactatttatttttcttttgtatcttcaaattgacgttgttctaagcgttctattgcagctcgtcgtttagtatcatcaatgtttgtataaagagatgttgtttccatagaattatgtcccatttgatttgctaataatactaaatctttattttcattatagtgattagtagcataagtatgacgtaatttatgagggcttttcttttcatcaaaagcccttgtgtatttctctgtaagctt

SEQ ID NO: 275 - DNA, 4623 bp, Bacillus thuringiensis
  source 1..4623: mol_type = genomic DNA
tcaatttaaatatttcattttgaatataataaaactaaataatatgaagtttagaatattaatgttatgagctgctatcaaaaggaaagctgctatcaaaaggaaagcaataatgaagaataaataatagcttatatttttaggaaggccaaaagataagctattaaaacatactgaattcattctaaatataggtaatatatttatatttaataaaattcgttgcattttgtgaatattttcataagctgaaccatatgatttaaactggggccaagataaatggcccaaagttataaaggcatatgtgctaaagtccaaaaaacgggaggtaaatcatcaaaaaaatcgtactatacaattttcttaggtaatgctgtgttaaaactaatcagtggagaaaagttaaataggttgtaatgtaagcacaacgtaaaaggaggagttatattgaattcaaataggaaaaatgagaatgaaattataaatgctttatcgattccagctgtatcgaatcattccgcacaaatggatctatcaccagatgctcgcattgaggatagcttgtgtgtagccgaggggaacaatattgatccatttgttagcgcatcaacagtccaaacaggtattagtatagctggtagaatattaggcgtattaggggtgccgtttgccggacaactagctagtttttatagttttcttgttggggaattatggcctagcggcagagatccatgggaaatttttatggaacatgtcgaacaaattgtaagacaacaacaaataacggacagtgttagggataccgctattgctcgtttagaaggtctaggaagagggtatagatcttaccagcaggctcttgaaacttggttagataaccgaaatgatgcaagatcaagaagcattattcgtgagagatatattgctttagaacttgacattactactgctataccgcttttcagcatacgaaacgaagaggttccattattaatggtatatgctcaagctgcaaatttacacctattattattgagagacgcatccctttttggtagtgaatgggggatgtcatctgccgatgttaaccaatattaccaagaacaaatcagatatacagaggaatattctaaccattgcgtacaatggtataatacagggctaaatagattaagagggacaactgccgaaacttgggtacggtataatcaattccgtagagacctaacattaggtgtattagatttagtggcactattcccaagctatgacactcggacttatcccattccaactaccgcccaacttacaagagaagtgtatacagatccaaacggtgttgtagcaggacccaataatagttggtttagaaatggagcttcgttttccgctatagaaaacgcaattattcgacaacctcacctatatgattttctaacgaaccttacaatttacacgagaagaagtcaagtaggcactacaattatgaatttgtgggcagggcatagaatcacgtttaatagaatacaaggtggttctactagtgaaatggtgtatggggctattactaacccagttagtgttagtgacataccatttgtcaatcgggatgtttaccgaactgtatcattagctggtgggcttggctctctgagtggaatacgttatggtttaactagagttgattttgatatgatatttcgtaaccatcctgatatagtaactggattattttatcatccgggacacgcgggcattgcaacccaagtaaaagattcagacacagaattaccacctgaaacgacagaacagccaaattatagagcatttagtcatctactaagtcatatttcaatgggtccaacgactcaagacgtacctccagtatattcttggacacaccagagtgcagatcgtacgaatacaatcaattcggataggataacacaaataccattggtaaaggcgcataccctccaatcgggtaccactgtagtaaaagggccagggtttacaggaggggatatcctccgtcgaacaagtggaggaccatttgcttttagtaatgttaatctagattttaacttgtcacaaaggtatcgtgctagaattcgttatgcctctactactaacctaagaatttacgtaacggttgcaggtgaacgaatttttgctggtcaatttgacaaaacgatggatgctggtgccccattaacattccaatcttttagttacgcaactattaatacagcttttacattcccagaaagatcgagcagcttgactataggtgccgatacgtttagttcaggtaatgaagtttatgtagatagatttgaattaatccaagttactgcaaccttcgaggcagaatctgatttagaaagagcgcggaaggcggtgaatgccttgtttacttctacaaatccaagaggattaaaaacagatgtaacagattatcatatcgaccaagtatccaatctagtagagtgtttatcagatgaattctgcttggataaaaagagagaattactcgaagaagttaaatatgcaaagcgacttagtgatgagcggaatttactccaagatccgacttttacatccattagtggccaaacagaccgtggatggataggaagcactggtattagcattcaaggaggcgatgacatattcaaagaaaattatgtgagactaccaggtaccgttgacgagtgctatccaacgtatttgtatcaaaaaatagatgagtcacaattaaaatcttatactcgctatcaattaagaggctatatcgaagatagtcaagatttagagatttatttgattcgttacaatgcgaaacatgaaacattaagtgtgccaggtactgagtccccatggccatcttcaggagtatatccaagtggaaggtgcggagaaccgaatcgatgtgcaccacgaatcgaatggaatcccgatctagactgttcttgcagatatggagagaaatgcgttcatcattcccatcatttctccttggatattgatgttggatgtacagatttgaatgaggatctaggcgtatgggtgatatttaagattaagacacaagatggccatgcgaaactaggaaatctagaattcatcgaagagaaaccattattaggaaaagcgctgtcccgtgtgaagagagccgagaaaaaatggagagacaaatatgaaaaactacagttggagacaaaacgagtatatacagaggcaaaagaatctgtggatgctttatttgtagactctcaatatgataaattgcaagctaatacgaacatcgggataatccatggggcagataaacaggttcatcgaatccgagaaccgtatctttcagaattacctgtcattccgagtatcaatgcggccatttttgaagaattagagggccatattttcaaagcgtattctctatatgatgcaagaaatgtcataaaaaatggcgatttcaataatggtttatcgtgttggaacgtaaaagggcatgtagatgtacaacagaaccatcatcgttcggtccttgttctctcagaatgggaagcagaagtgtcacaaaaggtacgcgtatgtccagatcgaggctatatccttcgtgtcacagcgtataaagagggatatggagagggatgcgtaacgattcatgaattcgaagataatacggatgtactgaagtttagaaactttgtagaagaggaagtatatccaaacaacacggtaacgtgtaatgattatactacgaatcaaagtgcagaaggatctacggatgcatgtaattcctataatcgtggatatgaggatggatatgagaatagatatgaacccaatccttcagcaccagttaattacacaccgacgtacgaagaaggaatgtatacagatacacagggatataatcattgtgtatctgatcgaggatataggaatcatacaccattaccagctggttatgtaacactagaattagagtatttcccagaaacagagcaagtatggatagaaattggagaaacggaaggaacatttatcgtaggtagcgtggaattactccttatggaggaataggatacgttttaaagtgaaacgtatgcaaataaagaatgatcgctggcctatattgacagataaataaggaaattaatatatgaacaaaaacggacatcactcttaagggtatgatgtccgttttttatatgatttggtttaaagattgatatgtaaatatatttttttacgaaggctttacataaaaaagaatctttatagcaaaatttaaaattaaatcttacatatagctggattgaaaataaagcaaacttattaattgaattatataaaaagattaaatgctattcaagatcttaacattttgttaaatctacttcattaacgttacttaaatgtattttataataatatttagtaacttgtattggtattttaaattttttgattattaaaagacgttaaatataaaaacagaaagaaggaatgaatttggataataactccttattgaaaagtatgcattgagattataaaaactaaaatcgtggtattttttataataacaaccatgttttttttcat

SEQ ID NO: 276 - DNA, 1902 bp, Bacillus thuringiensis
  source 1..1902: mol_type = genomic DNA
atgaatagtgtattgaatagcggaagaactaccattcgtgatgcgtataatgtagtggctcatgatccatttagttttcaacacaaatcattagataccatacaaaacgaatggacggagtggaaaaaaaataatcatagtttatatgtagatcctattgttggaactgtggctagttttctgttaaagaaagtggggagtcttattggaaaaaggatactaagtgagttacggaatttaatatttcctagtggcagtacaaatctaatgcaagatattttaagagagacagaaaaattcctgaatcaaagacttaatacagacactcttgcccgtgtaaatgcggaattgacagggatgcaagcaagtgtagaagagtttaatcgacaagtagataattttttgaaccctaaccgaaacgctgttcctttatcaataacttcttcagttaatacaatgcagcaattatttctaaatagattaccccagttccagatgcaaggataccaactgttattattacctttatttgcacaggcagccaatttacatctttcttttattagagatgttattcttaatgcagatgaatggggaatttcagcagcaacattacgtacgtatcgagattacctgaaaaattatacaagagattactctaactattgtataaatacgtatcaaagtgcgtttagaggcttaaacactcgtttacacgatatgctagaatttagaacatatatgtttttgaatgtatttgaatatgtatctatctggtcgttgtttaaatatcaaagtcttctagtatcttccagttcgaatttatattcaagtggtagtggaccacagcagacccaatcatttacttcacaagactggccatttttatactctcttttccaagttaattcaaattatgtgttaaatggttttagtggtgctaggctttctaataccttccctaatatagttggtttacctggttctactacaactcacgcattgcttgctgcaagggtcaattacagtggaggaatttcgtctggtgatataggtgcatcgccgtttaatcaaaattttacttgtagcacatttctctcccctttgttaacgccatttgttaggagttggctagattcaggttcagatcgggagggtgttgccaccgttacaaattggcaaacagaatcctttgagacaactttagggttaaggagtggtgcttttacagctcgcggtaattcaaactatttcccagattattttattcgtaatatttctggagttcctttagttgttagaaatgaagatttaagaagaccgttgcactataatgaaataagaaatatagcaagtccttcaggaacacctggtggagcacgagcttatatggtatctgtgcataacagaaaaaataatatctatgccgttcatgaaaatggttctatgattcatttagcgccaaatgactatacaggatttactatttcgccaatacatgcaactcaagtgaataatcaaacacgaacatttatttctgaaaaatttggaaatcaaggtgattccttaagggttgaacaaagcaacacgacagctcgttatacgcttagagggaatggaaatagttacaatctttatttaagagtatcttccataggaaattccactattcgagttactataaacggtagagtttatactgctttaaatgttaatactactacaaataacgatggagttaatgataatggagctcgtttttcagatattaatatcggtaatgtagtagcaagtagtaatactgatgtaccattagatgtaaatataacattaaactccggcactcaatttgatcttatgaatattatgcttgtgccaactaatatttcaccactttattaa

SEQ ID NO: 277 - DNA, 1952 bp, Bacillus thuringiensis
  source 1..1952: mol_type = genomic DNA
tccatggatgaatccgaacaatcgaagtgaacatgatacaataaaaactactgaaaataatgaggtgccaactaaccatgttcaatatcctttagcggaaactccaaatccaacactagaagatttaaattataaagagtttttaagaatgactgcagataataatacggaagcactagatagctctacaacaaaagatgtcattcaaaaaggcatttccgtagtaggtgatctcctaggcgtagtaggtttcccgtttggtggagcgcttgtttcgttttatacaaactttttaaatactatttggccaagtgaagacccgtggaaggcttttatggaacaagtagaagcattgatggatcagaaaatagctgattatgcaaaaaataaagctcttgcagagttacagggccttcaaaataatgtcgaagattatgtgagtgcattgagttcatggcaaaaaaatcctgtgagttcacgaaatccacatagccaggggcggataagagagctgttttctcaagcagaaagtcattttcgtaattcaatgccttcgtttgcaatttctggatacgaggttctatttctaacaacatatgcacaagctgccaacacacatttatttttactaaaagacgctcaaatttatggagaagaatggggatacgaaaaagaagatattgctgaattttataaaagacaactaaaacttacgcaagaatatactgaccattgtgtcaaatggtataatgttggattagataaattaagaggttcatcttatgaatcttgggtaaactttaaccgttatcgcagagagatgacattaacagtattagatttaattgcactatttccattgtatgatgttcggctatacccaaaagaagttaaaaccgaattaacaagagacgttttaacagatccaattgtcggagtcaacaaccttaggggctatggaacaaccttctctaatatagaaaattatattcgaaaaccacatctatttgactatctgcatagaattcaatttcacacgcggttccaaccaggatattatggaaatgactctttcaattattggtccggtaattatgtttcaactagaccaagcataggatcaaatgatataatcacatctccattctatggaaataaatccagtgaacctgtacaaaatttagaatttaatggagaaaaagtctatagagccgtagcaaatacaaatcttgcggtctggccgtccgctgtatattcaggtgttacaaaagtggaatttagccaatataatgatcaaacagatgaagcaagtacacaaacgtacgactcaaaaagaaatgttggcgcggtcagctgggattctatcgatcaattgcctccagaaacaacagatgaacctctagaaaagggatatagccatcaactcaattatgtaatgtgctttttaatgcagggtagtagaggaacaatcccagtgttaacttggacacataaaagtgtagacttttttaacatgattgattcgaaaaaaattacacaacttccgttagtaaaggcatataagttacaatctggtgcttccgttgtcgcaggtcctaggtttacaggaggagatatcattcaatgcacagaaaatggaagtgcggcaactatttacgttacaccggatgtgtcgtactctcaaaaatatcgagctagaattcattatgcttctacatctcagataacatttacactcagtttagacggggcaccatttaatcaatactatttcgataaaacgataaataaaggagacacattaacgtataattcatttaatttagcaagtttcagcacaccattcgaattatcagggaataacttacaaataggcgtcacaggattaagtgctggagataaagtttatatagacaaaattgaatttattccagtgaattaatgaggatcca

SEQ ID NO: 278 - DNA, 3543 bp, Bacillus thuringiensis
  source 1..3543: mol_type = genomic DNA
atgaatccttatcaaaataaaaatgaatatgaaacattaaatgcttcacaaaaaaaattaaatatatctaataattatacaagatatccaatagaaaatagtccaaaacaattattacaaagtacaaattataaagattggctcaatatgtgtcaacagaatcagcagtatggtggagattttgaaacttttattgatagtggtgaactcagtgcctatactattgtagttgggaccgtactgactggtttcgggttcacaacacccttaggacttgctttaataggttttggtacattaataccagttctttttccagcccaagaccaatctaacacatggagtgactttataacacaaactaaaaatattataaaaaaagaaatagcatcaacgtatataagtaatgctaataaaattttaaacaggtcgtttaatgttatcagcacttatcataatcaccttaaaacatgggagaataatccaaacccacaaaatactcaggatgtaaggacacaaatccagctagttcattaccattttcaaaatgtcattccagagcttgtaaactcttgtcctcctaatcctagtgattgcgattactataacatactagtattatctagttatgcacacgcagcaaacttacatctgactgtattaaatcaagccgtcaaatttgaagcgtatttaaaaaacaatcgacaattcgattatttagagcctttgccaacagcaattgattattatccagtattgactaaagctatagaagattacactaattattgtgtaacaacttataaaaaaggattaaatttaattaaaacgacgcctgatagtaatcttgatggaaatataaactggaacacatacaatacgtatcgaacaaaaatgactactgctgtattagatgttgttgcactctttcctatttatgatgtaggtaaatatccaataggtgtccaatctgaacttactcgagaaatttatcaggtacttaacttcgaagaaagcccctataaatattatgactttcaatatcaagaggattcacttacacgtagaccgcatttatttacttggcttgattctttgaatttttatgaaaaagcgcaaactactcctaataattttttcaccagccattataatatgtttcattacacacttgataatatatcccaaaaatctagtgtttttggaaatcacaatgtaactgataaattaaaagctcttggtttggcaacaaatatttatatttttttattaaatgtcataagcttagataataaatatctaaatgattataataatattagtaaaatggatttttttataactaatggtactagacttttggagaaagaacttacagcaggatctgggcaaataacttatgatgtaaataaaaatattttcgggttaccaattcttaaacgaagagagaatcaaggaaaccctaccctttttccaacatatgataactatagtcatattttatcatttattaaaagtcttagtatccctgcaacatataaaactcaagtgtatacgtttgcttggacacactctagtgttgatcctaaaaatacaatttatacacatttaactacccaaattccagctgtaaaagcgaattcacttgggactgcttctaaggttgttcaaggacctggtcatacaggaggggatttaattgatttcaaagatcatttcaaaattacatgtcaacactcaaattttcaacaatcgtattttataagaattcgttttgcttcaaatggaagcgcaaatactcgagctgttataaatcttagtatcccaggggtagcagaactgggtatggcactcaaccccactttttctggtacagattatacgaatttaaaatataaagattttcagtacttagaattttctaacgaggtgaaatttgctccaaatcaaaacatatctcttgtgtttaatcgttcggatgtatatacaaacacaacagtacttattgataaaattgaatttctgccaattactcgttctataagagaggatagagagaaacaaaaattagaaacagtacaacaaataattaatacattttatgcaaatcctataaaaaacactttacaatcagaacttacagattatgacatagatcaagccgcaaatcttgtggaatgtatttctgaagaattatatccaaaagaaaaaatgctgttattagatgaagttaaaaatgcgaaacaacttagtaaatctcgaaatgtacttcaaaacggggattttgaatcggctacgcttggttggacaacaagtgataatatcacaattcaagaagatgatcctatttttaaagggcattaccttcatatgtctggggcgagagacattgatggtacgatatttccgacctatatattccaaaaaattgatgaatcaaaattaaaaccgtatacacgttacctagtaaggggatttgtaggaagtagtaaagatgtagaactagtggtttcacgctatggggaagaaattgatgccatcatgcatgttccagctgatttaaactatctgtatccttctacctgtgattgtgaagcgtctaatcgttgtgagacgtccgctgtgccggctaacattgggaacacttctgatatgttgtattcatgccaatatgatacagggaaaaagcatgtcgtatgtcaggattcccatcaatttagtttcactattgatacaggggcattagatacaaatgaaaatataggggtttgggtcatgtttaaaatatcttctccagatggatacgcatcattagataatttagaagtaattgaagaagggccaatagatggggaagcactgtcacgcgtgaaacacatggagaagaaatggaacgatcaaatggaagcaaaacgttcggaaacacaacaagcatatgatgtagcgaaacaagccattgatgctttattcacaaatgtacaagatgaggctttacagtttgatacgacactcgctcaaattcagtacgctgagtatttggtacaatcgattccatatgtgtacaatgattggttgtcagatgttccaggtatgaattatgatatctatgtagagttggatgcacgagtggcacaagcgcgttatttgtatgatataagaaatattattaaaaatggtgattttacacaaggggtaatggggtggcatgtaactggaaatgcagacgtacaacaaatagatggtgtttctgtattggttctatttaattggagtgctggcgtatctcaaaatgtccatctccaccataatcatgggtatgtcttaggtgttattgccaaaaaagaaggacctggaaatgggtatgtcacgcttatggattgggaggagaatcaagaaaaattgacgtttacgtcttgtgaagaaggatatattacgaagacagtagatgtattcccagatacagatcgtgtacgaattgagataggcgagaccgaaggttcgttttatatcgaaagcattgatttaatttgcatgaacgagtga

SEQ ID NO: 279 - DNA, 1470 bp, Bacillus thuringiensis
  source 1..1470: mol_type = genomic DNA
atgtttacaagtggtgcgaaaaataggttaaagctagaaacgacagattatgaaatagatcaagtggctaatgctatagaatgtatgtcagatgaacaatattcaaaagaaaaactgatgttatgggatcaagtaaaacatgcaaaataccttagtcagtctcgaaatttgcttcaaaatggtgattttgaagatgtatttcatggatggactacaagtgatcatatgtacattcagtcggataattctacttttaaaggaaattatctgaatatatctggggcgcgagacatatacttaacgatatttccaacatacatttaccaaaaaattgatgaatcaaaattaaaaccgtatacacgttacctagtaaggggatttgtaggaagtagtaaagatgtagaactagtggtttcacgctatggaaaagaaatagatacagtcatgaatgtaccatttgatatcccgtatgtatcttctaggcctgtttgtaatgaattatatgatggtgaacaacaaccgtatccaaatgggaatgtaggatattataatccaatgtcagcttttacgccttcttacacatctgatgctcgtcagtgtatgccagggaaaaaacagatagtctgtcaagattctcatcagtttaagttccatattgatacaggtgaagtagattataatacaaatatagggatttgggtcatgtttaaaatatcttccccagatggatacgcattattagataatttagaagtaattgaagaagggccaatagatggggaagcactgtcacgcgtgaaacacatggagaagaaatggaacgatcaaatggaagcaaaacgttcggaaacacaacaagcatatgatgtagcgaaacaagccattgatgctttattcacaaatgtacaagatgaggctttacagtttgatacgacactcgctcaaattcagtacgctgagtatttggtacaatcgattccatatgtgtacaatgattggttgtcagatgttccaggtatgaattatgacatctatgtagagttggatgcacgagtggcacaagcgcgttatttgtatgatacaagaaatattattaaaaatggtgattttacacaaggggtaatggggtggcatgtaactggaaatgcagacgtacaacaaatagatggtgtttctgtattggttctatctaattggagtgctggcgtatctcaaaatgtccatctccaacataatcatgggtatgtcttacgtgttattgccaaaaaagaagggcctggaaatgggtatgtcacgcttatggattgtgaggagaatcaagaaaaattgacgtttacgtcttgtgaagaaggatatattacgaaaacagtagatgtattcccagatacagattgtgtacgaattgagataggcgaaaccgaaggttcgttttatatcgaaagcattgaattaatttgcatgaacgagtaa

SEQ ID NO: 280 - DNA, 4377 bp, Bacillus thuringiensis
  source 1..4377: mol_type = genomic DNA
atggcaattttaaatgaattatatccatctgtaccttataatgtattggcgtatacgccaccctcttttttacctgatgcgggtacacaagctacacctgctgacttaacagcttatgaacaattgttgaaaaatttagaaaaagggataaatgctggaacttattcgaaagcaatagctgatgtacttaaaggtatttttatagatgatacaataaattatcaaacatatgtaaatattggtttaagtttaattacattagctgtaccggaaattggtatttttacacctttcatcggtttgttttttgctgcattgaataaacatgatgctccacctcctcctaatgcaaaagatatatttgaggctatgaaaccagcgattcaagagatgattgatagaactttaactgcggatgagcaaacatttttaaatggggaaataagtggtttacaaaatttagcagcaagataccagtctacaatggatgatattcaaagccatggaggatttaataaggtagattctggattaattaaaaagtttacagatgaggtactatctttaaatagtttttatacagatcgtttacctgtatttattacagataatacagcggatcgaactttgttaggtcttccttattatgctatacttgcgagcatgcatcttatgttattaagagatataattactaagggtccgacatgggattctaaaattaatttcacaccagatgcaattgattcctttaaaaccgatattaaaaataatataaagctttactctaaaactatttatgacgtatttcagaagggacttgcttcatacggaacgccttctgatttagagtcctttgcaaaaaaacaaaaatatattgaaattatgacaacacattgtttagattttgcaagattgtttcctacttttgatccagatctttatccaacaggatcaggtgatataagtttacaaaaaacacgtagaattctttctccttttatccctatacgtactgcagatgggttaacattaaataatacttcaattgatacttcaaattggcctaattatgaaaatgggaatggcgcgtttccaaacccaaaagaaagaatatcaaaacaattcaaactgtatcctagttggagagcgggacagtacggtgggcttttacaaccttatttatgggcaatagaagtccaagattctgtagagactcgtttgtatgggcagcttccagctgtagatccacaggcagggcctaattatgtttccatagattcttctaatccaatcatacaaataaatatggatacttggaaaacaccaccacaaggtgcgagtgggtggaatacaaatttaatgagaggaagtgtaagcgggttaagttttttacaacgagatggtacgagacttagtgctggtatgggtggtggttttgctgatacaatatatagtctccctgcaactcattatctttcttatctctatggaactccttatcaaacttctgataactattctggtcacgttggtgcattggtaggtgtgagtacgcctcaagaggctactcttcctaatattataggtcaaccagatgaacagggaaatgtatctacaatgggatttccatttgaaaaagcttcttatggaggtacagttgttaaagaatggttaaatggtgcgaatgcgatgaagctttctcctggacaatcgataggtattcctattacaaatgtaacaaaacaaaactatcaagtgcgttgtcgttatgcaagtaatagtgataatcctgttttctttaatgtagatactggtggagcgaatccaattttccaacagataaactttgaatctactgtagatagtaatatgggagtaaaaggagaaaatggcgtctatgtagtcaaatctattgctacaactgataattcttttacagtaaaaattcctgcgaagacgattaatgttcatttaaccaaccaaggttcttctgatatctttttagatcgtattgagtttattccttttaaactaacattatctcctactccaattactttagatccgatgaagaccattacagcttctgtcttaagtgcaactagggcctctgatggcataacaaccatcaatgatccagtagatggaactctactttctttacctatgggtacttccatcgattttagtattcttaatcctactcaaactggaacatatcaagtcagtattctctacaaatcttcatccggcggttttactattactaaagtaacaaatgatcaaaacggacagatggtagattatgcttcaacctcagaactacaatatagcaaccctatttacgtcttgtctagcaatacaggaaacactgtattgaccattggacctgggggatattccggcccagatttactcataaaagaaattagattcaccccagcaactccaaattcatcaaataaaattgatacagattttcagttagttgatgggcaaggcacagtaactatttggaaaagtgataaaattgcatatacactagcagatatagatatacagatttcctttaatcaaaccgcttggcaaagtcctaatattacaccttatttaaatgatgatccagtaggtggaatagcaactttttataatactactggtgaatcccaacattttactaaagatagtctactcttccaaagaggttttaacaatattcgggttaacaatggatttggtggtgccactatttctggtcatatgaaagcaaatgtaattgataatccttcttaaaaattaaggttcattttaaaaacttcaggttacaacgtttactattttaaatttacaaactaagggggccgcgtaatggtactatcacgtatagtcaatcccattttcaccgagcaagaagatttaaataatattataacgcaaatcaatgctctattcgtttctagtacacaagataaattaaaaccaggtgtgagtgattattggatcgaggaaattgtactgaaagtggatgccttatcagatgaggtatttggaacagaaaagaaggctttacgtaaattggtgaatcaggcaaaacgtttaagtaaagcaagaaatcttctgataggcggtagttttgaaaattgggatgcatggtataaagggcaaaaagtagtaagattatcggatcacgaactgttgaagagtgatcatgtattattaccaccaccaggattgtctccatcttatattttccaaaaagtggaggaatctaaattaaaagcaaatacacgttatacggtttctggatttattgcgcatgcaacagatttagaaattgtggtttctcgttatgggcaagaaataaagaaagtggtgcaagttccttatggagaagcattcccattaacatcaagtggaccagtttgttgtatcccacattctacaagtaatggaactttaggcaatccacatttctttagttacagtattgatgtaggtgcattagatgtagacacaaaccctggtattgaattcggtcttcgtattgtaaatccaactggaatggcacgcgtaagcaatttggaaattcgtgaagatcgtccattagcagcaaatgaaatacgacaagtacaacgtgtcgcaagaaattggagaaccgagtatgagaaagaacgtgcggaagtaacaagtttaattcaacctgttatcaatcgaatcaatggattgtatgacaatggaaattggaacggttctattcgttcagatatttcgtatcataatatagacgcgattgtattaccaacgttaccaaagttacgccattggtttatgtcagatagatttagtgaacaaggagatatcatggctaaattccaaggagcattaaatcgtgcgtatgcacaactggaacaaaatacgcttctgcataatggtcattttacaaaagatgcagccaattggacggtagaaggcgatgcacatcaggtagtattagaagatggtagacgtgtattacgattgccagattggtcttcgagtgtgtctcaaacgattgaaatcgagaattttgatccagataaagaatatcaattagtatttcatgggcaaggagaaggaacggttacgttggagcatggagaagaaacaaaatatatagaaacgcatacacatcattttgcgaattttacaacttctcaacgtcaaggactcacgtttgaatcaaataaagtgacagtgaccatttcttcagaagatggagaattcttagtggataatattgcgcttgtagaagtccctatgtttaacaagaatcaaatggtcaatgaaaataaaggtgtaaatataaatagcgatacaagtatgaacaacaatcaa

SEQ ID NO: 281 - DNA, 2097 bp, synthetic construct
  source 1..2097: mol_type = other DNA
atggcaaccatcaacgagctgtacccagtgccctacaatgtactcgctcacccaatcaaggaagtagacgatccttatagttggtctaacttgctgaagggaatccaagagggctgggaggaatggggaaagacgggccagaagaagctctttgaggaccatttgacaattgcgtggaacctgtacaagaccggaaagttagattacttcgcactcactaaggcttcaatcagtctgattggcttcatcccaggagccgaggctgcagtccccttcatcaatatgtttgttgacttcgtttggccaaagttgttcggcgccaacacagaaggaaaggatcaacagctcttcaacgcaatcatggacgctgtgaataagatggtcgataacaagtttctgtcctacaacttgtccacgctcaacaaaaccatagagggcctccaaggaaacttgggcttattccagaatgccatccaggttgctatctgtcaaggatctactcccgagcgcgtcaatttcgaccagaactgcacaccatgcaatcctaaccagccatgcaaggatgacctcgatagagtggccagtcgattcgacaccgctaactcacagtttacccagcatcttcctgaattcaagaatccatggagcgatgagaactccacgcaagaattcaagagaactagcgtcgaactcacacttcctatgtacaccactgtggccacactccaccttctcttgtacgaggggtacatagagttcatgaccaaatggaacttccacaacgaacagtacctcaacaaccttaaggttgagttgcagcaactcatccactcatacagcgagactgtgaggacatcttttcttcagttcttgccaaccctcaataaccggtcaaaatctagcgtcaacgcctacaatcgttacgtgaggaacatgactgttaactgtcttgacatcgctgcaacatggccgaccttcgatactcacaattaccaccaaggtgggaagttggacctcacacggatcatcctttcagataccgccggtccaatcgaggagtacactactggagacaagacctctggtcccgagcactccaacatcactcctaacaatatcttggatacaccgtcccccacctatcagcattctttcgtcagcgtggactccattgtctattctaggaaggagctccagcaacttgatatcgctacttacagcacaaacaactccaataactgccatccttacgggttgagactctcttacaccgacggtagcagatacgattacggagacaaccagcctgatttcactacatccaataacaactattgtcacaattcttacaccgcaccgattactcttgttaacgccagacacttgtacaacgctaaaggaagcctacagaatgtggaatccctcgtggtctctacagttaacgggggtagcgggtcctgcatttgcgacgcatggattaactatttgcgtcccccacaaacctctaagaacgagtccaggcctgaccagaaaatcaacgtgctatacccaattactgagacagtgaacaagggtaccgggggcaatctgggagtaatctcggcttacgttcctatggagttggtgccagagaacgtcattggtgacgtgaacgcagacaccaagttgcctctgacacaattgaaggggttcccattcgagaagtatggtagtgaatacaataaccgtggaatctcgctcgttagagaatggatcaatggaaacaacgcagtcaagctgtccaattcgcagtccgtcgggatacagattaccaatcagactaaacagaagtacgagatccgttgccgatatgcttcaaagggggataacaatgtttacttcaacgtggacttgtctgagaacccctttcgcaatagtatttcattcgggtccacagaatcatctgtggttggcgtccaaggggagaacggcaagtacatcctcaagagtattaccactgtggagatcccagccggatcattctatgtccacattacaaaccagggctcctcagacctgttcttggataggatcgaattcgttcctaagattcagtaa

SEQ ID NO: 282 - DNA, 3393 bp, Bacillus thuringiensis
  source 1..3393: mol_type = genomic DNA
atgattcaaaaaaactatgaaattataggtgcttcaacaaacggcataaccgaattacctgaagattacaacactatagtcagcccctatgatgctccagcatccgttactacaactattgaaattactggaaccatactaagcgatttaggtgtttcaggggcatcatcagttagtttacttttgaataaacttttaaatatattatggccaaataatgccaatactgtgtgggggacattcgcaaaagagaccgctgatcttctaaatgaagtgttatctgtggatgatccagtagtaatagaagcaaatattaatttagaagggctaaaaagcacccttgatttatatttagaggcacttaaagaatggaaaaatgatccccaaaatccagcatcccaagagcgtgtcagaactagatttcgtaatgtggatgatgattttacacatgatatgccttcctttgctagagctggatatgaaacgaagctattaacagtttatgcacaagctgcaaatcttcatttacttttattaagagatgcttctatgtttggagaaggttggggaatgtctcaagtaaacataaatgataactataatcgccaattacgattgacggctcaatatacggatcatagtgtaaagtggtataacgcaggactagaaaaattaaaagggaattcaactagggaaaattggtatacttgtaatagatttcagagagaaatgacgttaatggtgttagacgtagttgcattatttccaaactacgatacacgaatgtacccgatcgcaacgtcatcagaacttacaagaatgatttatacagatccaattgcttatacacaaagcgatccatggtacaagataacatctctttctttttcaaatattgaaaacagtgcgattccaagtccatctttcttcaggtggctaaaatccatttcaattaatagccagtggtggggcagtggtcctagtcaaacctactattgggttggacatgaattggtatattctaattcaaattataatcaagcacttaaggttaaatatggagaccccaattcttatattgagccccctgattctttcagcttttcttctaaggatgtttacagaaccatctctgtcgttagaaattcaataagtaattatatagtaagtgaagttcaattcaattagtaatacacataaaattagtgagaaatttataaacatcaatcaaattgggatagaagagaaacaaaagattcaattactgaactatccttagctgctaatcccccaacaacatttggaaatgtagcagaatacagtcatagattagcatatatttcagaggcataccaaagtcacaacccatcaaaatacccaacctacatacctgtattcggttggacgcacacaagcgtacgttacgataataaaatttttccggaaaaaatcactcaaattccagctgttaaaagcccttcagctgaaggttgatcatggcaaaatatagtaaaaggtcccgggtttactgaaggagatgtgacaactgctgtttcgccagcaactgtaaccgacataataaaaatacacgttactctagatccaaattcactttcacaaaaatatcgtgcatgacttcgctatgcttccaatgcatttgtagcagctacattgtatacaaatacaagtagtaattataattttgaacttacagaaagtacaactgaacagtttacaacatataattcatacaagtatgtagatattccaggttcaatacaatttaataatacttctgatacagtgtctgtttatttgcatatggattcaacaactaatgcaaccgttcatgtagatagaattgaattcattccagtagatgaaaattacgataacagagtaagactagaaaaagcacagaaatctgtgactgccttgtttacagcgggaagaaatgcactccaaacggatgtgacagattttaatgtagatcaggtttcaattttagttgattgtataccacgggcattatatcctaatgagaaacgcgaactactaagtttagtcaaatatgcaaaacgtttgagctattcccgtaatttcctcctagatccaacattcaattctatcaattcatcagatgagaatggctggtacggaagtaatggtattgcaattggcagtgggaatattttattcaaagggaactatttaattttctcaggtgccaatgatgaacagtatccaacctatctctatcaaaaaatagacgaatctaagttaaaagaatatacacattataaactgacaggttttatcgagagtagtcaggatttagaagcatacgtgattcgttatgatgcaaaacatcaaacaatggatgtatccaataatctattctcagatattactcctgtaaatgcatgcggagaaccaaatcgttgtgcggcactaccatacctggatgaaaatccaagattagaatgtagttcgatacaagatggtattttatctgattcgcattcgttttctctccatatagatacaggttcaattgatttcaatgagaacgtaggaatttgggtgttgtttaaaatttctacacctgaaggatatgcgagatttggaaacctagaagtgattgaagatggcccagtcattggagaagcattagcccgtgtgaaacgccaagaaacgaagtggagaaacaagttaacacaactgcgaacggaaacacaagcgatttatacacgagcaaaacaagccattgataatttattcacaaatgcacaggactctcacttaaaaataggtgctacatttgcgtcaattgtggctgcaagaaagattgtccaatccatacgtgaagcgtaaatgtcatggttatctatcgtcccaggtgtaaattatcccatttttacagaattgaatgagagagtacagcaagcatttcaattacatgatgtacgaaatgtcgtgtgtaatggccgattccttaatggaacatctgattggattataacctctgacgtaaaggtacaagaagaaaatgggaataacgtattagttctttccaattgggatgcgcaagtattatacaatgcatgaagctctatcaataccacggatatatcttgcgtgtaacggcacgtaaagaaggattgggagaaggatatattacaattacggatgaagaagggcatacagatcaattgacatttggtgcatgtgaggagatagatgcatcctaacacgttcgtatccacaggttatatgacaaaagaactagaatttttcccagatacagagaaggtgcgtatagaaattggagaaacagaagaaatattccaggtggaaagtgtagaattatttttgatgaaagatctatgttaa

SEQ ID NO: 283 - DNA, 3525 bp, Bacillus thuringiensis
  source 1..3525: mol_type = genomic DNA
atgagtccaaataatcaaaatgaatatgaaattctagatgcttcatcatctacttctgtatccgatagttctgttagataccctttagcaaacgatcaaacgaccacattacaaaacatgaactataaagattgtctgagaatgtctgagggagagaatcctgaattatttggaaatccggagacgtttattagttcatctacggttcaaactggaattggcattgttggtcaagtactgggggctttaggggttccatttgctggacagatagctagtttttatagtttcattgtcggtcaattatggccatcaagtaccgtgagtgtatgggaaatgattatgaaacaagtggaagatctaattgatcaaaaaataacagattctgtaaggaaaacagcgcttgcaggactacaaggattaggagatggcttagacgtatatcagaaatcacttaagaattggctggaaaatcgtaatgatacaagagctagaagtgttgtggtgacccaatatatagctttagagcttgattttgttgctaaaatcccatcttttgcaatatctggacaggaagtaccattattatcagtgtatgcacaagcagcgaatttacatttgctattattacgagatgcttccatttttggagcagagtggggattcacaccaggagaaatttccacattttatgatcgtcaggtgacacgtaccgcccaatactcggattattgtgtaaagtggtataacactggcttagataaattaaaaggtacgaatgctgcaagttggctgaagtatcaccaattccgaagagaaatgacattactggtattagatttagtagcgttatttccaaactatgacacacgtacgtatccaatcgaaacaacggcccaacttacacgggaagtgtatacagatccaatagtatttaacagagaaacaagtggtggattttgtaggcgttggtcacttaacagtgatatttctttttcagaagtcgaaagcgctgtaattcgttcaccacacctatttgatatactcagtgaaatagaattttatacaacaagagcggggcttcccttgaataatacggaataccttgaatattgggtaggacattctataaaatataaaaatacgaatgcctcatcagcattagaacgtaattacggtacgattacttctaacaaaatcaagtattatgatttagcaaataaggatatctttcaggttcgatcattaggggcggatttagctaattactacgcacaggtatatggagttccgtacgctagttttacactgcttgacaagaatacaggatcaggatcagttggaggttttacgtactcaaaaccacatacaactatgcaagtatgtacacaaaattacaatacgattgatgaaatccctccagagaatgagccacttagtagagggtatagccatagattatctcatatcacctcttattctttttctaagattgctagtagtcctgctagatatggcaatctccctgtatttgcttggacacatcggagtgcggatgttacaaatacagtttattcagataaaattactcaaattccagttgtaaaagggatcgacctcgggagcacaagtacgattgtaaattttgaatacaatggaggaagtatagtcaaagatactaaatcatcaactcataataactctctttcacgaatagtgagtttaatgataaaaaccgaggatccaaatccaaattcccgctctttatatcgtattagggttaagtatgctgctgatgtgcctggaactttccgactgcatattcaaaatacttccccggttacagtaccctttactgcgacgatgagcggtactaatttacaatacagttcctttaaatatatagaatatataggttactttaataatagagaagttggtttttctattgagtcaagtacatcacagggtagaacacgtaatgtatatatcgacaaaatcgaattcatcccggtagatgcgacatatatagcagaagaagacctagaggtggcaaagaaagctgtgaatggcttgtttacgaatacaaaagatgccttacagacaagtgtaacggattatcaagtgaatcaagcggcaaacttagtagaatgcctatccgatgagttatacccaaatgaaaaacgaatgttatgggatgcagtgaaagaggcgaaacgacttgttcaggcacgtaacttactccaagatacaggctttaataggattaatagagaaaacggatggacgggaagtacgggaattgagattgtggaaggagatgttctgtttaaagatcgttcgcttcgtttgacaagtgcgagagagattgatacagaaacatatccaacgtatctctatcaacaaatagatgaatcacttttaaaaccatatacaagatataaactaaaaggttttataggaagtagtcaagatttagagattaaattaatacgtcatcgggcaaatcaaatcgtcaaaaatgtaccagataatctcttgccagatgtactccctgtcaattcttgtggtgggatcgatcgctgcagtgagcaacagtatgtagacgcgaatttagcactcgaaaacaatggagaaaatggaaatatgtcttctgattcccatgcattttctttccatattgatacaggtgaaatagatttgaatgaaaatacaggaatttgggtcgtatttaaaattccgacaacaaatggatacgcaacactaggaaattttgaattggtagaagaggggccattgtcaggggaaacattagaacgagcacaacaacaagaacaacaatggcaagacaaaatggcaagaaaacgtggggcatcagaaaaagcatattatgcagcaaagcaagccattgatcgtttattcgcagattatcaagaccaaaaacttaattctggtgtagaaatgtcagatatgttggcagcccaaaaccttgtacagtccattccttacgtatataatgatgcgttaccagaaatccctggaatgaactatacgagttttacagagttaacaaatagactccaacaagcatggaatttgtatgatcttcgaaatgctataccaaatggagattttcgaaatggattaagtgattggaatgcaacatcagatgtgaatgtgcaacaactaagcgatacatctgtccttgtcattccaaactggaattctcaagtgtcacaacaatttacagttcaaccgaattatagatatgtgttacgtgtcacagcgagaaaagagggagtaggagacggatatgtgatcatccgtgatggtgcgaatcagacagaaacactcacatttaatatatgtgatgatgatacaggtgttttatctgctgatcaaactagctatatcacaaaaacagtggaattcactccatctacagagcaagtttggattgacatgagtgagaccgaaggtgtattcaacatagaaagtgtagaactcgtgttagaagaagagtaa

SEQ ID NO: 284 - DNA, 3525 bp, Bacillus thuringiensis
  source 1..3525: mol_type = genomic DNA
atgagtccaaataatcaaaatgaatatgaaattatagatatggcaccttctacatctgtaaccaatgattctaacagatacccttttgcgaatgagcccacaaatgcattacaaaatatgaattataaggattatttaagaatgtctgagggatattctcctgaatatttaacaagcctaagtccttacagccagtttggcacagttgataagatcatcagtattattagtctattgaatagtgctgcaggtattcctggtcttgatttttttactggattgctgcaatttattcttgacttctttgcaccagaggatccgtgggcagagttaatggaactagtggaacaactcatagatcaaaaaataacagttgctacaagagaaaaggcgctcgcagaattaagaggactgataaatggataccttgtatatcagcaatcattagaaagttggctggaaaatccaaatgctacaagagctagtatagttcgagaacaatatgtcgctttagaacttgattttgttacttcgatttcatcttttgcgatagctggacaggaagtaccgttattagccgtgtacgcacaagctgctaatttacatttgttattattgagagatgtgtcaatatttggagaagaatggggattaacagtaaatgaggttaataccttctatattcgtcaaatgacttatacaactgagtatagtgattattgtgtaagaatttataatactggcttaaataaattaaaaggatctagtgcatctagttgggttgattataatcgctttcgtagagaaatgaacttactagtactagatattattgcgttatttccaaactatgatgttcgtaggtatccaatggaaacaacaacggaattaacaagagtagtttacactgatccaattgtgtttgacgaaaggaagggggtggcgtcgactcatagttggacggcgattgcaccatctttctcaagtatagaatctctaactcgacgaccaggattatttacatggttagatcaactaactattttttcgaaacgcatatcgcaacctagtgtatttataaatagttgggcggggcataagattagcacctttagaacacaaaaaacagatatactcataaataccacccatggagatactaataatcctataaaagaatttgtagtagataccaaaaaagtagaagatatttatcaaacgatagcatacccacatgcagtagcaaatgaagtattctatttattcggtgtcccaaaagttgattttaatatggtacctgcaggtggctctgcaaactctgcacacaccctcattttttctgatagtacgggagggagactggaaagtattacgaagaactcagaagcagaattacctccaacagagtcattatcagatacacctcaaccaaaccaagtaacttattctcacagattagattatgctacaataattaaagcaaataaaagttatggaagtgggtatattccattattaggttggacccatcggagtgtagatcgtaataatacaatttatccgaataaaatcactcaaataccagcagtaaaagctttctcatatactgaatcatttaatgtaaatgttattgcaggtccaggattcacaggaggagatttaataagtttaggtcatttagagaatatttatatgaaattaaacgttccaaatcctcaaaaattccgtgttcgtattcgttatgctgctagtacaacttcgtatttgcaaataactgggctatctaatttagctcagtctgatcgtttcgaacagacgtattctaatgaaaatgaaaacaatttgatgtttgaaaattttcaatatgtagaacttagaaatattttttcggtagatgctccattagaaaatcatcaagtaagtatacaaaattatcaaggtaatggttttgttattatagaccgaatcgaattcatcccagtaaatgcaacatatgaggcagaacaagatttagattcggcaaagaaagcagtgaataccttgtttacgaatacaaaagatggtttacgaccaggggtaacggattatgaagtgaatcaagcggcaaacttagtggaatgcctatcggatgatttgtatccaaatgaaaaacgcttgttatttgatgcagtgaaagaggcaaaacgactcagcgaggcacgtaacttactacaagatccagatttccaagagataaatggagaaaatggatggaccgcaagtacaggaattgaggttgtagaaggagatgctctatttaaagggcgttatctacgcctaccaggtgcgagagaaatggatacagaaacgtatccaacgtatctgtatcaaaaagtagaggaaggtgtattaaaaccatacacaagatatagattgagagggtttgtcggaagcagtcaaggcttggaaatttccacaattcgtcatcagacgaaccgaattgtaaaaaatgttccagatgatttattaccagatgtacctcctgtaaactctgatggtagaatcaatcgatgcagcgaacaaaagtatgtgaatagccgtttagaaggagaaagaggattaccaaatgggaatcgttctgctgaagcgcatgaattctctctccctattgatataggagagctggattacaatgaaaatgcaggaatatgggttggatttaagattacggacccagagggatatgcaacactcggtaaccttgaattggtagaagagggaccattgtcaggagacgcactagaacgcctgcaaagagaagaacaacagtggaagcttcaaatgacaaaaagacgtgaagagacggatagaaaatatacggcagcaaaacaagcggtagatcgtttatatgcagattaccaagatcaacaattgaatccaaacgtagaaattacggatattactgcggcccaaaacctgatacagtccattccttatgtatataatgaaatgttcccagaaatacaagggatgaactatacgaagtacacagagaaaacaaatcgactccaacaagcgtggggtttgtatgatcaacgaaacgccataccaaatggtgatttccgaaatgaattaagtaattggaatacaacatctggtgtaaatgtacaacaaatcaacaatacgtctgtcttagtcatgccaaactgggatgggcaagtttcgcaacagtttacagttcaaccgaatcaaagatatgtattacgagttactgcaagaaaagaaggggtagggaatgggtatgtgactatccgtgatggtggaaatcaaacagaaacgcttacgtttagtgcaagcgattataacacagatagtgtgtataatacgcaagtgtcgaatacaaatgggttgtacaatgagcaaacaggatataccacaaaaacagtgacattcatcccatatacagatcaagtgtggattgagatgagcgagaccgaaggtatgttctatatagaaagtgtcgaattgattgttgacgtagagtaa

SEQ ID NO: 285 - DNA, 3474 bp, Bacillus thuringiensis
  source 1..3474: mol_type = genomic DNA
atgagtccaaataatcaaaatgagtatgaaattatagatgcgtcatcacctacttctgtatctaataactcagtgaaataccctttagcaagtgatcaaacgaccacattacaaaatatgaactataaagattatctgagaatgtctgagggagagaatcctgaattatttggaaatccagagacgtttattagtgcgcaggatgcggttggaactgggattgatattgtgagtaaactactaggtagtttaggggttccacttgttgggcaagccgcaacggcacttaaatggattataggtaaattgtggccttcttcaggaaacccgtgggatgatttgatgacggcagtagaagaactcataaatcaaaaaatagaagcatatgcaagaagtaaggcacttgctgaattgggtgtttcgggaagagctgtaaaatcctatcaaaccgcacttgaagagtggcaaaaaaacccgaataacgcgcgaagcgcagcacttgtaagggaaagattttcagatgcagaacatacattgcgtactcaaatgagtttatttaccgttcgtggttatgaaattccgcttttagcaacatatgcacaagctgccaatttgcatttgtttgtaatgaaggatattcaaatttacgggagagaatggggatatactcagggagatattaaccttttctatcgagaacaagtagaatttacaggggaatactctgattattgtgttaagtggtacaatgctggcttagataaattaagaggctcgactgctctacaatggattaactataatcgtttccgcagagaaatgacagtgatggcactggatatagttgcattattcccaaattatgacatacgcatgtatccaatgaaaacaaccgcagaattaacgcgaagaatttatacagatccgcttggttatacgggaagtgggtctaacacgccaccatggtataattatggatattctttctcatggatagaaaataatgccatgccagcacctggattgttccagtggttacaaggaattgggatttatactaaatttgctcgtataactccattttatgcgaactattggtcaggacatactgtattttataaatttactaacgattctactgagagacgtgttcagtatggagatacagatactccagaattagatagttcttcctttgaaaatgttgacatttataaggtttcagcatcagttggttcgtacaaaagtaataccgtactattaccaacttttaaagctacttttgagggggtaaatcaaaataatcagttaaagacctttaggtatcaaaaagaatctaatgtcccaagtcaaacgaaaaactcaaccacagagctgcctgttcagttatcaactccgcctacttacggagattctgaacagtacagtcatagactagcctatgtttttgatgccccaatcgattcatatacaggcatatatcgcatgtatggatttgcccctattcttggttggacacatattagtgtaagtcgtgacaataggattgatccagataaaattactcaaattccagctgtaaaggcatatgctgagggtcttgctaattatatcaaagatccggggtttacaggaggagatttattagctttaggtagaaactcaaatacttcattgattgttaatttttcgaagcctcaaacataccgtattcgtattcgttatgctgctagtaaaacttcgtattttcaactacgtgggctgcataatatagctcagtctcagcgtttcgaagcgacgtattctaataaaaatgaaaacgatttgacatttaacgattttaaatatgtagaaattcaaaaaactgtttcaatagacaatccatcagaaagtcgtagtataagtatatacactcaatcagatacagaattacttattatagacaaaatcgaattcatcccagtagatgcaacatttgaagcggaacaagacctagatgtggcaaagaaagcggtgaatggcttgtttacgaatacaaaagatgccttacagacaagtgtaacggattatcaagtcaatcaagcggcaaacttagtagaatgcctatccgatgagttatacccaaatgaaaaacgcatgttatgggatgcagtgaaagaggcgaaacgacttgttcaggcacgtaacttactccaagatacaggctttaatgtaataaatggagaaaacggatggacgggaagtacgggaattgaggttgtggaaggagatgttctgtttaaagatcgttcgcttcgtttgccaagtgcgagagagattgatacagaaacatatccaacgtatctctatcaacaaatagatgaatcgcttttaaaaccatatacaagatatagactaagaggttttataggaagtagtcaagatttagagattaaattaatacgtcatcgggcaaatcaaattgtcaaaaatgtaccggataacctcttgccagatgtacgccctgtcaattcttgtggtggagtcgatcgctgcagtgaacaacagtatgtagacgcgaatttagcactcgaaaacaatggagaaaatagaaatatgtcttctgattcccatgcattttctttccatatggatacaggtgaaatagatttaaatgaaaatacaggtatttgggtcgtatttaaaattccgacaacaaatggatacgcaacattaggaaaccttgaattggtagaagaggggccattatcaggagacgcactagaacgcttgcaaagagaagaacagcagtggaagcttcaaagaaccaaaagacgtgaagagacggatagaaaatatatggcagcaaaacaagccattgatcgtttattcgcagattatcaagaccaacaactcaattctggtgtagaaatgtcagatttgcttgcagctcaaaaccttgtacagtccattccttatgtgtataacgaaatgttcccagaaatccctggaatgaactatacaaatttcacagagttaacaaacagactccaacaagcatggaatttgtatgatcttcgaaatgctataccaaatggagattttcgaaatggattaagtgattggaatgcaacatcagatataaatgtgcaacaactaaacgatacatctgtccttgtcattccaaactggaattctcaagtgtcacaacaatttacagttcaaccgaattatagatatgtattacgtgtcacagcgagaaaagagggagcaggagacggatatgtgatcatccgtgatggtacaaatcagacagaaacactcgcatttaatacatgtgataatgatgcaggtgttttatctactaatcaagctagctatatcacaaaaacagtggaattcacaccatctacagagcaagtttggattgacatgagtgagaccgaaggtgtattcaacatagaaagtgtagaactcgtgttagaagaagagtaa

SEQ ID NO: 286 - DNA, 2094 bp, Bacillus thuringiensis
  source 1..2094: mol_type = genomic DNA
atgaatccatatcagaataagaatgaatatgaaatattggatagttcacaaaataactttaatatgtctattaatcatttacaatatccattaaaaaatagtccatatcctcaattttctatagacaattgtaggcgtagtaatactgctacttgggttaataatattggggatgcagttagtgaatcaatatctttggtgtcaacaatattggggatttttacagaacctaatttgtggggagtattttctgcattaattggtcttctagataggatgagaggtgctctgggaacaccttctatagctgcattatctatatgtgatttgctagaaattattgatgaacgagtaaatcggagtgttttgaatgacggaatcgctgattttaatggttcattagctctatttggaaatttcttgtccgcattaaattcctggagaaataatccaaacaatagtactgctgatgagcttcgttttcgttttagagcatctgattcagaatttgataggagtttaacaaatggatctttaacacatggtggttcattagctagacaggatgcacaaatattattattaccttcttttgcaaaagctgcatattttcacttatttttattaaatgaggctattacaagtggatctaattggggtctggagattaggcctactataaattatcaagaaaaattagaaaatagtattagaaattacaccaattattgtgtacattggtacaatcagggtttagaggaaatacgccgccggaataatagtggtgaaaattggttagtatttcacagattccgtagagatatgacattgcaagtattagatctagtagcaacatttccgaattttgatactaatcgatattctacttcaatgccaataactactcaattaagtagggtgatttatacagatccaatcggttgtgtaagtcaatcccatctaaatagtaattggtttggcccagtaaatggtactaattttacaagtttagaaaatgaaattcctagtcctaccctttctcaatttttaaattctatagatttagttgatcagccgcttagatggggtgttggaactaatggaggaaatacatggcaaggaaatacaaatagttttaatttttcctcttcatctactgttttccatgaaagttatggaagacgaactggtcagaatattatccgtgggctgaatggtagggatgtttttagaatagattcgagacctatttctctagatggtcatacattcggagttaatagagtagaatttcatcatactactagttctcaaaactctatatatacaggatatttgagaacatccggacttaatagaccagtggttcagaatgtccggacgtttttaccaggagaaaattctgatataccaaatcgagaagattatactcatagattaagtagggtagcaaatataacaggtgggcttcgacatgtagcagttcgtgaggatcaaagttcttctttattgttatatggctggacacataaaagcttaactcgtgaaaatatgtataatcttaatgaaatttttcaaatacctgctgtaaaaacaatgaacacacctggtattcaagtaattgcaggacctggatctacaggtggggatttattaagactaaatcttggtgctagagtaacttataattgtagacctgctcgtccattagaaacaccaatggtagtacatgtacgtgttcgttatgctagtgtaggaagttctacaataagaatagagtttactgatccatctggttcatttaatccacaaacacttgctttacctgatacaaattcatcattaaataatcttcaatatcaaaatttcaacatggttaccactaatttcgcacgtggtacgagtataatgcaaggtaatttttcaataagtattataaatatgaatggagctaatttagctttagataaaattgaaattataccggttcgtattggtcgaaacacctcagaacaagtaaaagaatttattgataaactgggttgtgttgcaaagtttgaaaaatatagttatagtttaagcggttctgaataa

SEQ ID NO: 287 - DNA, 2028 bp, Bacillus thuringiensis
  source 1..2028: mol_type = genomic DNA
atgaatccatatcaaaataagaatgaatatgaaatattcaatgctccatccaatggttttagcaagtctaataactattctagatatccattagcaaataagccaaatcaaccactgaaaaacacgaattacaaagattggctcaatgtgtgtcaagataatcaacaatatggcaataatgcggggaattttgctagttctgaaactattgttggagttagtgcaggtattattgtagtaggaactatgttaggagcttttgctgcccctgtcttagctgcaggtataatatcttttgggactttgttgccgatcttttggcaaggatctgaccctgcaaatgtttggcaggatttgttaaacatcggaggaaggcctatacaagaaatagataaaaacataattaatgtactaacttctatcgtaacacctataaaaaatcaacttgataaatatcaagaatttttcgataaatgggagccagcacgtacacacgctaatgctaaagcagtacatgatctctttactaccttagaacctataatagataaagatttagatatgttaaaaaataatgctagctatcgaataccaacactccctgcatatgcacaaatagctacttggcacttgaatttattaaaacatgctgctacctattacaatatatggctgcaaaatcaaggtataaatccaagtactttcaattcatctaattactatcagggctatttaaaacgtaaaatacaagaatatactgactattgtatacaaacgtacaatgcaggactaactatgattagaactaatactaacgcaacatggaatatgtataatacttaccgtttagaaatgactctaactgtgttagatcttattgctatttttccaaattatgacccagaaaaatatccaataggagttaaatctgaacttatcagagaagtttatacgaatgttaattcagatacatttagaaccataacagaactagaaaatggattaactagaaatcctacattatttacttggataaaccaagggcgtttttacacaagaaattctcgagacattcttgatccttatgatattttttcttttacaggtaaccagatggcctttacacatactaatgatgatcgcaacataatctggggagcggttcatggaaatattatttctcaagacacatccaaagtatttcctttttatagaaacaaacctattgataaggtcgaaattgtcagacatagagagtactcagatataatatatgaaatgatatttttttcgaatagcagtgaagtatttcgatattcatccaattcaacaatagaaaataattataaaagaactgattcttatatgattccaaaacaaacatggaaaaataaagaatatggtcatactctatcgtatataaaaactgataattatatattttcagtagttagagaaagaagaagagttgcatttagttggacacatactagtgttgatttccaaaatacaatagatttagataacatcacccaaatccacgctctaaaagctttgaaggtaagttctgattcgaaaattgtgaaaggtcctggtcacacaggtggagacttggtaattcttaaagatagtatggattttagagttagatttttaaaaaatgtttctcgacaatatcaagtacgtattcgttatgctactaatgctccaaagacaacagtattcttaaccggaatagatactataagtgtggagctccctagtaccacttcccgccaaaacccaaatgctacagatttaacatatgcagattttggatatgtaacatttccaagaacagttccaaataaaacatttgaaggagaagacactttattaatgaccttatatggtacaccaaatcattcatataatatatatattgacaaaatcgaatttattccaatcactcaatctgtattagattatacagagaagcaaaatatagaaaaaacacagaaaatagtgaatgatttatttgttaattaa

SEQ ID NO: 288 - DNA, 1941 bp, Bacillus thuringiensis
  source 1..1941: mol_type = genomic DNA
atgaattatatggaagatagttctttagatactttaagtatagttaatgaaacagactttccattatataataattataccgaacctactattgcgccagcattaatagcagtagctcccatcgcacaatatcttgcaacagctatagggaaatgggcggcaaaggcagcattttcaaaagtactatcacttatattcccaggttctcaacctgctactatggaaaaagttcgtacagaagtggaaacacttataaatcaaaaattaagccaagatcgagtcaatatattaaacgcagaatatagggggattattgaggttagtgatgtatttgatgcgtatattaaacaaccaggttttacccctgcaacagccaagggttattttctaaatctaagtggtgctataatacaacgattacctcaatttgaggttcaaacatatgaaggagtatctatagcactttttactcaaatgtgtacacttcatttaactttattaaaagacggaatcctagcagggagtgcatggggatttactcaagctgatgtagattcatttataaaattatttaatcaaaaagtattagattacaggaccagattaatgagaatgtacacagaagagttcggaagattgtgtaaagtcagtcttaaagatggattgacgttccggaatatgtgtaatttatatgtgtttccatttgctgaagcctggtctttaatgagatatgaaggattaaaattacaaagctctctatcattatgggattatgttggtgtctcaattcctgtaaattataatgaatggggaggactagtttataagttattaatgggggaagttaatcaaagattaacaactgttaaatttaattattctttcactaatgaaccagctgatataccagcaagagaaaatattcgtggcgtccatcctatatacgatcctagttctgggcttacaggatggataggaaacggaagaacaaacaattttaattttgctgataacaatggcaatgaaattatggaagttagaacacaaactttttatcaaaatccaaataatgagcctatagcgcctagagatattataaatcaaattttaactgcgccagcaccagcagacctattttttaaaaatgcagatataaatgtaaagttcacacagtggtttcagtctactctatatgggtggaacattaaactcggtacacaaacggttttaagtagtagaaccggaacaataccaccaaattatttagcatatgatggatattatattcgtgctatttcagcttgcccaagaggagtctcacttgcatataatcacgatcttacaacactaacatataatagaatagagtatgattcacctactacagaaaatattattgtagggtttgcaccagataatactaaggacttttattctaaaaaatctcactatttaagtgaaacgaatgatagttatgtaattcctgctctgcaatttgctgaagtttcagatagatcatttttagaagatacgccagatcaagcaacagacggcagtattaaatttgcacgtactttcattagtaatgaagctaagtactctattagactaaacaccgggtttaatacggcaactagatataaattaattatcagggtaagagtaccttatcgcttacctgctggaatacgggtacaatctcagaattcgggaaataatagaatgctaggcagttttactgcaaatgctaatccagaatgggtggattttgtcacagatgcatttacatttaacgatttagggattacaacttcaagtacaaatgctttatttagtatttcttcagatagtttaaattctggagaagagtggtatttatcgcagttgtttttagtaaaagaatcggcctttacgacgcaaattaatccgttactaaagtag

SEQ ID NO: 289 - DNA, 1941 bp, Bacillus thuringiensis
  source 1..1941: mol_type = genomic DNA
atgcaaaataacaactttaataccacagaaattaataatatgattaatttccctatgtataatggtagattagaaccttctctagctccagcattaatagcagtagctccaattgctaaatatttagcaacagctcttgctaaatgggctgtaaaacaagggtttgcaaaattaaaatccgagatattccccggtaatacgcctgctactatggataaggttcgtattggggtacaaacacttttagaccaaagattacaagatgacagagttaagattttagaaggtgaatacaaaggaattattgaggtgagtaaagtttttactgattatgttaatcaatctaaatttgagactggaacagctaataggcttttttttgatacaagtaaccaattaataagcagattgcctcaatttgagattgcaggatatgaaggagtatccttttcactttttactcagatgtgtacatttcatttgggtttattaaaagatggaattttagcaggaagcgattggggatttgctcctgcagataaagacgctcttatttgccaattcaatagatttgtcaatgaatataatactcgactgatggtattgtactcaaaagaatttggacggttattagcaaaaaatcttaatgaagccttgaactttagaaatatgtgtagtttatatgtctttcctttttctgaagcatggtctttattaaggtatgaaggaacaaaattagaaaacacgctttcattatggaattttgtgggtgaaagtatcaataatatatctcctaatgattggaaaggtgcgctttataaattgttaatgggagcacctaatcaaagattaaacaatgttaagtttaattatagttatttttctgatactcaagcgacaatacatcgtgaaaacattcatggtggcctgccaacatataatggaggaccaacaattacaggatggatagggaatgggcgtttcagcggacttagttttccttgtagttatgaattagaaattacaaaaataaaacaggaaataacttacaatgataaagggggaaatttcaattcaatagttcctgctgctacgcgcaatgaaattctaactgctaccgttccaacatcagctgatccattttttaaaaccgctgatattaactggaaatatttctctccgggtcttttctctggatggaatattaaatttgatgatacagtcactttaaaaagtagagtaccaagtattataccttcaaatatattaaagtatgatgattattattttcgtgccgtttcagcctgtccaaaaggcgtatcacttgcatataaccatgattttttaacgttaacatataataaattagaatatgatgcacctactacacaaaatatcattgtaggattttcaccagataatactaagagtttttataggagcaactctcattatctaagtacaacagatgatgcctatgtaattcctgctttacaattttctacagtctcagatagatcattcttagaagatacaccagatcaagcaacagatggcagtattaaatttacggatactgttcttgggaatgaggcaaaatattctattagactaaatactggatttaatacagctactaggtatagattaattatacgttttaaagcgcgtgctcgtttggctgctggtatacgtgtacgttctcaaaattcagggaataataagttattaggtggtattcctgtagagggtaattctggatgggtagattatattacagattcatttacttttgatgaccttgggattacaacttcaagtacaaatgctttctttagtattgattcagatggtgtaaatgcttctcaacaatggtatttgtctaaattaattttagtaaaagaatccagttttacgactcagattccattaaaaccatag

SEQ ID NO: 290 - DNA, 4391 bp, Bacillus thuringiensis
  source 1..4391: mol_type = genomic DNA
gaaaattcgagaattaatcagacatgcaggcgccaaaaacgtagtattggatggcagagatggagtaatgaatatctctatggtgtactagggctctattgggactggaaagttcgtccccttgaaagctcaggaagatattgataaaagtgtctgccatttgataggtctcataacccttttgatgaagtttatggggtgagctgcttgagggaaaacctcacgagcagttcttatggggaggggctggaaacgggttataactgataccgcgccagtcctttacccgacaacgaacttttgcttggttagaaaattaccgcaggctttggaaaaactgtgaacgaacacttgaaaatagcagacaaagttgcttattggcagctgtggctattttattaaaaagattccaaacaggttctcagaaaatagttgtaattcatcttgaatcgaaagattcataaaaaacgtcatcctttctagctttttagaaagaataacgttttttgacacttgggggtagtcttatttcttaagttgatgggcatgcaacagaaccctaaaaaatcaataattcaacaaaaataatggggatatttgttgaattattgcaacaggaatacatacgtagattgcgaatatttagaagtacaccctacatattattggttaggtggaatgaattataaaaaatgatgggaataagggaggaacgaagatgcattattatgggaataggaatgaatatgacatattaaatgcttcatcaaacgattcaaacatgtctaatacttatccgaggtatccgttagcaaatccacaacaagatttaatgcaaaatacaaattataaagattggcttaatgtatgtgaagggtatcatatagaaaatcctagagaagcaagcgttagagctggacttggtaagggattaggtatagttagtacaatcgtagggttctttggtggttctattatcttagatacaattggattgttttaccaaatttcagagctactttggccagaggatgatacccagcaatacacttggcaagatattatgaatcatgtagaagatcttatagacaaacgaataactgaggttatacgaggaaatgcaattagaacattagcagatttacagggtaaagttgatgattataacaattggttgaagaaatggaaagacgatccaaaatctacaggtaatttaagcaccttagtaaccaagtttacggctcttgattcagattttaatggtgctataaggacagttaataatcaggggagtccaggttatgagttacttttattgcctgtctatgcacaaattgcgaatctgcatttacttttattacgggatgctcagatttatggagataaatggtggagcgcacgagctaatgctcgtgataattattaccaaatacaattagagaaaacaaaggaatatacagaatattgtataaattggtataataagggtttaaatgattttagaacagcaggtcaatgggtaaactttaatcgttatcgtagagaaatgactcttactgtattagatattatttcaatgttccctatttatgacgcgagattatatcctacagaagtaaaaaccgaactaactagggaaatttattcagatgttattaatggggagatatatggacttatgactccttatttttcttttgagaaagctgaatcactttatacaagggcaccccatctcttcacttggctaaaaggatttcgatttgtaaccaattctatttcttattggacatttttatcaggtggtcaaaataagtattcttatactaataattctagtattaacgagggctcttttaggggacaggacacagattatggtgggacttcttctaccattaatattccatcaaattcgtatgtatataatttatggacggaaaattatgaatatatttatccttggggtgatcctgtaaatattacaaaaatgaatttttctgtaacagataataattcttcaaaagaattaatttatggtgcacacagaacgaataaacctgttgttcggacagattttgattttctcactaataaagagggaactgagttagcaaaatataatgattataatcatattttatcctatatgttaattaatggggaaacgtttggtcagaaacgtcatggttattcgtttgcttttacacatagtagtgttgatcctaataataccattgcagcgaataaaattacgcaaattcctgtagtgaaagcttcgagtataaatggatcgatttcaattgaaaaaggtcccggatttacgggaggagatttggtaaagatgagagcagattcaggtttaactatgcgttttaaagctgaattattagataaaaaatatcgtgttcgaatacgttataaatgtaactacagttctaaattaatactacgaaaatggaaaggggaaggttatatacaacaacaaattcacaatatttctcccacatatggagccttttcttatttagagtcttttactataactacgacagaaaatatatttgatttgacaatggaggtaacatatccgtatggtagacagtttgttgaagatataccatctcttatattagataaaatcgaattcctcccaactaactgataccattcacaggaaatatgaggaaaaatatgaattagaaagatcacaggaaacatttaatagtatatttgttgattaaaacaaagtactaacgtagatggtatagctgtttgaaaaaataagaaaaaaggttgtgaattttatgcttacaagtggtgcgaaaaatatgttaaaactcgaaacgacagattatgaaatagatcaaatggcgaatgctatagaaaatatgtcaggtgaacaatattcacaggaaaaaatgatgcaatggcatgacataaaatatgccaaacaattgagtcaagcacgtaatttacttcaaaatggtgattttgaggatttatttagtggatggactacaagtaatcagatgtccattcaggcagataatgcaacttttaaagggaactatctgcatatgtctggggcgagagacatatatggaacgatattcccaacgtatatataccaaaaaattgatgaatccaaattaaaaccgtatacgcgttatctagtcaggggatttgtgggaagtagtaaagatctagaattaatggtaatgcgttatggaaaagaaattgatacagtaatgaatgtaccaaatgacataccgtacgtaccttctatgccggtctgtaacgaattatatgatggtcaacaaccgtatccaaataggcatgtaggatattataatccaatgccagtttctcagccttcttacacatccgatacttgtcagtgtacgcccggcaaaaaacatgtggtatgtcatgattctcatcaattcaagtttcatattgatacgggggaagtagattacaatacaaatctaggaatttgggtgttgtttaaaatctcttcacccgatggctacgcgacattagataatttagaagtaattgaagagggaccagtaagaggcgaagcagtgacacatgtaaaacaaaaggaaaagaaatggaatcagcaaatggagaaaaagcgcatggaaacaaagcgagtctatgaccgagcaaaacaggcggtagatgcattatttacaggagaagagttaaactatgatgttacattgtcacacattaagaacgccgatgatttggtacagtcgattccatatgtacacaatgagtggttaccggattttccaggcatgaactatgatatataccaagagttaaacgcgcgtatcatgcaagcacgctatttatacgatgcacgaaatgtcataacaaatggggattttgcacaaggattacaagggtggcatgcggaaggaaaagtagaagtacagcaaatgaacggaacgtctgtattagtcttatccaattggagctctggagtatctcaaaaccttcatgtccaacatccacatggatatctgttacgtgtgagtgcgaaaaaagaagggtctgggaaaggctatgtaacgaggatgagttgtaatggtaagcaggaaacacttacgtttacgtcctgtgacggaggatatatgacaaaaacggtagaggtattcccagaaagtgatcgtgtacgaattgaaattggggagaccgaaggttcgttttatattgaaagcatcgaattgatttgtatgaacggatatactagcaataataaccagaatatgagtaatatgtatgatcaaagttatagtgggaattatagtcagaatactagcgatatgtatgatcaaggaggttctgttgcaaagtttgaaaaagaatagaat

SEQ ID NO: 291 - DNA, 3668 bp, Bacillus thuringiensis
  source 1..3668: mol_type = genomic DNA
gactttttttgactatatgcatggcctctattccaacaatcatttttgtagctgtgcgccatgatttgaatccaagcatattccagattcattttttgataaatctatggtcttgttcaattatgttgtttacatatttttttacccgtagcggcatatcatttggtatatttttttcattttttaattctcgtatcgcaacaggataggctttatcaccatcaattgtgattacacgaggttttgtgacatgacaagaagccaatgctttctttagaaaacgcttggtagccttcgcatctcgtttcttacccaaataaaaatcaagggtgtttccttcggaatcgacagcaccatataggtacattttttcgcctttgatttttaggtatgtttcatcctgatcacgcacctttttttagtagtagtaccagtatggccaagttagaaaaatcattttcaagtttttttatgcttttgtaccagaaccgaatatttacctagatctataaatacgtataagattgataaatgttatacattctttcaattacttagtagtgacttccttaagcctacacataatatggattatagaaatattagtatagtgggaggaatcaaaatgaattcttatcagaataagaatgaatatgaaatcttagatgctaagcgaaatacttgtcacatgtctaattgttatcccaagtacccattagcaaatgatcctcaaatgtatttgcgcaacacccattataaggattggataaatatgtgcgaggaagcttcttatgcatcttcaggtccttcacaattatttaaagttggaggttctatagttgctaaaattcttggaatgattcctgaagttggtcctcttttaagttggatggtatctttattttggccaactattgaagaaaaaaatactgtttgggaagatatgataaagtatgtagcaaatctgctaaaacaagaattaacaaatgatacacttaaccgtgccactagtaatttatctgggttaaatgaatctttgaatatatataaccgagctctcgctgcgtggaaacaaaataaaaataatttcgcaagtggtgaacttataaggtcatatataaatgatcttcatatactctttacaagagatattcaatcagatttctcattaggaggttatgaaacagtattattaccttcatatgcaagtgctgccaatcttcatttacttttgttacgtgatgttgcaatttacggaaaagaattaggatatccatcaactgacgtagagttttattataatgagcaaaagtactatacagaaaaatatagtaattattgtgtaaatacgtacaaatcgggtttagaatcaaaaaaacaaataggatggtcagattttaatcgatatcgtagagaaatgactttatccgtattagatatagtcgcattattcccactgtatgatacaggactgtatccgagtaaagatggcaagatacatgttaaagctgaactaacaagagaaatctactctgatgttattaatgatcatgtatacggactcatggttccctatatatcttttgaacatgctgaatctctgtacactcgcaggccgcacgcatttacttggttaaaaggatttagatttgtaacgaattctattaatagttggacctttttatcaggtggtgaaaatagatatttccttactcatggagagggtactatttataatggaccttttttggggcaggatactgaatatggaggaactagttcttatatagatatctctaataattcctctatttataatttatggaccaaaaattatgaatggatttatccatggactgatccagttaatattacaaaaataaatttttctataacagataatagtaattctagtgagtctatttatggtgcggaaagaatgaataagcctactgttcgaacggattttaattttcttcttaacagagcaggaaatggtcctacgacatataatgattataatcacattttatcttatatgttaattaatggagaaacgttcggacaaaaaagacatggttattcatttgcatttactcatagtagtgtagataggtataataccattgtcccagataaaattgtgcaaatacctgctgtgaaaactaatttggtcggtgcgaatataataaagggtcctggtcatacaggtggcgatttacttaaactagaatatgagcgttttcttagtttacgtattaagcttatagcatcaatgacttttcggattagaattagatatgcttctaatatttctggacaaatgatgattaatataggttaccagaatcctacttattttaatattatccctacgacaagtagggactatactgagttaaaatttgaagatttccaattagtggacacatcctatatttactcaggtggcccatcgattagttcaaatacattatggctggataatttttctaatggacctgttattatagataaaattgaatttataccgttgggaattacactaaatcaagcacaaggttatgatacatacgaccagaatgctaatggtatgtatcatcaaaactacagcaattctggctataattataatcaagaatacaatacttattaccaatcgtataacaattaggttgtgttgcaaagtttgaaaaaacacaaccttgtgtgcaaaatatagttatagtttaagcggttctgaataactcctgtaattccttgtacgtcgaaaaagagaagtctggaatgtgacttctcttttgtttgtatatcgcatgaatcgtttcgattcctttcaatgtacgtgaagcatggcggagattttgaaatcctgcggatttaacaaaacggcgcttgatatgtctatgatcttgttcaatgagattatttagatgcttaacggtacaatgtttcgtatgtacatacaaaccgttatgtttcagttttttgagcgcacaaagtaaagcaggagccttgtctgtagtaagaaccgttggttctccaaaatctttaaccagtcgcttcataaacatataagcggcttgatgattgcgtgttttacgaagttgaatatccaaagtatgcccatctccaccaatagcacgataaagatagcgccattcgcctttcactttgatgtaagtctcatctaaatgccatatgaaatgtgcggatttgtttttctttttccaaatttgataaatcagattgccgtattcgtgaacccaacgcatgatggttgttggatgaactgatattccacgttctttcaagatttcagatacatcacgatagcttaaagaaaaacgacaatagtagccaacggctaccaaaataatatcttttttgaattgttttcccttaaaatatcccatgtgatatgctcctcatcccattttctctatataagttccgtttaatattttaacaattgttcagtccctaacctttgaagtaccttttcaggaaattgagaaagatgttctagaaaagaaagaacggatgtttttatttctttctgggatgcatgaaaacgattagagataacactttcttttaatgctttccaaatacgttccaataaattcaaattgggagaatacggcggtaaaaagacgagtgttgac

SEQ ID NO: 292 - DNA, 4807 bp, Bacillus thuringiensis
  source 1..4807: mol_type = genomic DNA
gcttcatttaaaaaactttgcaacagaacctcagtacatttgtttctttttatacgcacatatacatgcctgttttgcatataatattttggtgatattcttcataaaaaaggagtgattttattggtacagttatctgatttattacctagttattataatgtattagcttctccccctacaattttagatgctaaccaagactggttccccacaggtaatgatttcaaaagtgtaataaatgagctgaaagatgcttttactaaatttcaaaaagattttcatactagcgaccttattaacactatacaatccatttataactcttatggctctcaaggaatggattgggtcaatgtggctcaagctgtaataacttttgcttttggttttgtacccggtggatcattagtctctgcaggacttaataaaataataggtatatttttccccaaagaccctaatcctactgtatttgatcaaataaaagccgcagtagaacaattaatactcaattcatttatcacatatgatatacagggcgatataactgaattgaataaactgaaagattattctggaatattagcaaattctatacaagtagcgcttggtcaatcccaatttcaagaattccaacaagtaaatcctactgggccaccgacaaattgtactcataccccctcttgtactttagatccaactaaccctattccaccaaattgtagctgtttattgaattttgtatatcaaaattataataatcacacttccgatataaacacggtattacttcaaatagaaggttctattccaaagatttttgctcttattaatcaatccacaacagcaactactgctcaaaaaaaccaactaaaatctgattatttacaagcatatcttcctttatatgtaatgggcgcaactttagaaatgatatactatagaacatatattcaatttgctgaaacatttcagtatggtttaagtgaacaaaatagtactacactaacggctatgcacaacttacgtcttacaatttctagacgaactacatttctattcaataattttctcccatttttaccaagtataacttcaaatacaaaaggagatttaaattcatatattcaatatacaagacgtataacaataaatgctctggatactgctgtattttggactttactagatccatttgattatcctgtgtccgcaaatcaaacattatcccgtattatttttaatgatattgtaggaccagtagaatgtaaagctggtaaccaaaatagcaataacttactattcaatttttataacgtagatgggcaaccacttccaaataactctattactaattatttttataataatatgcaattaagaggtttgcaattccaaatatataaatatagttcaacctctacttatttctcgacaacatctgatattccaattggatttaaagcttcttatcgtacaaatggtagcgataaaaatattgatcatacacgttctctaccatacggactaaaaggatctacaacaacattaactgatgatatatatatcacgaatcctagttttaatattataaatatgaactcctctcaaacatcaggtcaaattgctacagatgtctcacaaattctatatacacctatttcagatataaaacaaaattgtttttctcaaaacagtccttatttagggaataatagaattcaagctatttatcctctacaacccactaatccaaacacttataatgcttatggtagtacagataaactcggatttttaactacactcatttcaaatgacaccactacaaaccttgtatttacttctgatcctatttatacatttcctgccgaacaagctactgtattatctggaacaaaacttgttgaatatgtgaatggtacagcttctgttcaattacaaaatgggcaaaatgctcaatacacgatagataatacaacaagaattgcaggtcctacacaatttcaattacgagtacatgtagcgacagatccagcagttacagatccaaatgttttaggacaactcgctattacaattgataatcaacgaacacaatatttaactatacccaatacaaatgttgattatagtaatccaataactcttttaaacggtcaacaacttaaccaattacgggtaaaaggaacacaaggtgcttatatgttagtacccgctagtaatctaaataatatcaatgatcgtaataccaatgtttttacattaaatccaaatgcatctatgaatgtaaatattcaaaatacaggaaatctaacagttatattagatcgtattgaattcgttcctatcgattcaacagtaataatcccagcacaaacactatattcaaatcaagcttatactctttgggaatcaacaaatggattaattggaaaacaggctttattagtagtagatgattatttacattttactgttcaatattattaccaatctcaattagtccattctaatgaacaaaatatatatgatgttaattatattggtctatttgataaaattacggctagtactatcgctgatactttagtaaaccttacaaatggaattgtttatttaactactaatacaacaccaacaccaacaccagctgtaccaagcccaattcctcctatatccaatcaaaatataggagctggatttgaatatactgtttgggatggtaataacaaaactggaaataccgtaaattttcaaggattcgctgcaccaaatagtggttccgaaggtttattatttcaatataaatataatgatcaagtaattgacacagatcaagtatcaaaccaattttctatccaacgtaaattagcaggtacaattaataaaattacagcaacaggtggaacaccaaatggagtgtatttaacgataaataatggtggttccgtgagtacaacataaaaaggaggaaaataaaatgaatccatgttctccattccaaaatatacctcaaaggaatttaaatcttcctgtttttattacaaaacaagaattagaacaaattactaaaatggtatctaacttatttttaacaacaaatcctgctttattacattgtttaccacctgatattacgttattagctcctcatgttagtgattattggattgatcaattactaatgaaagttgataaactgtcaactgaattatatggtgtcgaaaaacaagaattacgaaaattattaaatatagccaaacaaatgagtgttgcacgaaataaattaataggtggaaactttgaaacagtagaggcttggacattcggtacacaagcaactgttctttccaattcacctttatttgtagggaattttctatctttagaacctacaaatggtatatggacttcctacgcatttcaaaaaattaatgaatctcaattaaaaccatttacacgttatagtatttctggttttatcgctaatagtcaagggttagaacttacaatttcacgatacggaacagaattacaaactgttataaacattccaattgaaacagcacttcctatttatccaaatccaattccaaattgttgccagccaagtccatgtggatgcgattcttgtcaatatagagattcacatctttttaactattcaattaatgtaggtactttatttccagaattaaatcctggtattgaaattagtttacgcataatcgaaccaaacggaagagccagaattagtaatttagaagtaatagaagagcgtcctcttacagaagaagaaagaagacaaattcaacgaacagaacaattatggctaacaagagtagaaagagaactaaaaatcatttgtgatttatttgaaccaattattaaacaaattaactcctactttccagaaggggattggaacaatcacattttttctcatgtcacatatcaagatttatatagtattgtcataccggcactcccgatcattgaaaattggtctatgacgcatttgacaggtatgtataatcatctagtacgaccgattaaagaagtgatccaacaaattgaacaacaattagaagctcgaaatttacttcataatggaaatttttcaaatggactgacagattggactgtttgtggtgaagcaaccataatacctttaacaaatcaaaatcaagctttattcctttcttattgggattctatggtttcacaaactgttacagttgtaaattttaatccagataaattgtatttattacgtatctatgcaaaaggaaatggaactgttcttgttcaacataatggacacacagaacgtgttaacttcacacaagatttcttccaatcaaaagaacatactttttatctagatatggcaacctttaccgtagatattcaatccaattcaaatgattttacagtagattatgtagaaattatagaaatataaaataaacaaaactacatgtttttacttcatgtagttttttctctctttcttactctattcaagaaacgaggtgattgtatgcaaaaaaaaacaattttaataaattcttcttccacttctagcccctctccttccacctcttctttttcttcttctcaattactacaacaaggatataccaaaaaacaaggttgtaattgtaataaatagacaaacaaaaatagtgtatttaaaaaagttgcaaagtttgagaaatcataagtctgtttacaaaatactcttgtcatttaagcggttctgaataatggctataattctttctacgtcgcaaaagag

SEQ ID NO: 293 - DNA, 2169 bp, Bacillus thuringiensis
  source 1..2169: mol_type = genomic DNA
atgaaagaacaaaatctaaataaatatgatgaaataactgtacaagcagcaagcgattatatcgacattcgtccgatttttcaaacaaatggatctgctacatttaattctaataccaatattacaactttaacacaagctataaatagtcaagcaggagcaattgcaggaaagactgctctagatatgagacatgactttacttttagagcagatatttttcttggaactaaaagtaacggagcagacggtattgcaatcgcatttcatagaggatcaattgggtttgttggaacaaaaggcggaggacttggaatattaggtgcacctaaagggatagggtttgaattagacacatatgcgaatgcacctgaggacgaagtaggcgattcgtttgggcatggggcaatgaaaggatcattccctagtttcccaaatggatatccccatgctggctttgtaagtactgataaaaatagtagatggttatcagccctagctcagatgcagcgaatcgctgctccaaacgggcgttggagacgtctggagattcgttgggatgctcgtaataaagagttaactgcaaatcttcaggatttaacttttaatgacataactgttggagagaagccacgtactccaagaactgcaacttggaggttagtaaatcctgcatttgaacttgatcagaagtatacttttgttattggttcggcgacgggtgcatctaataacctacatcagattgggattatagaatttgatgcatactttactaaaccgacaatagaagcgaataatgtaaatgtcccagtgggagcaacatttaatccaaaaacatatccaggaataaatttaagagcaacagatgagatagatggggatttgacatcgaagattattgtgaaagcaaacaatgttaatacgtcgaaaacgggtgtgtattatgtgacgtattatgtagagaatagttatggggaaagtgatgaaaaaacaatcgaagtaactgtgttttcaaaccctacaattattgcaagtgatgttgaaattgaaaaaggggaatcttttaacccactaactgattcaagagtaggtctttctgcacaggattcattaggcaatgatattacccaaaatgtaaaggtaaaatcgagtaatgtggatacttcaaagccaggggaatatgaagttgtatttgaagtgacagatagctttggtggaaaagcagaaaaagatatcaaggttacagttttaggacagccaagtatagaagcgaataatgttgaattagaaatagatgatttatttgatccattaacagatgcaaaagtaggtctccgtgcaaaggattcattaggtaatgatattacgaaagacgtaaaagtaaagttcaataacgtagatacttcaaattcaggaaagtatgaagttatatttgaagtgacggaccgttttggaaaaaaagcagaaaaaagtattgaagtccttgttctaggagaaccaagcattgaagcaaatgatgttgaggttaataaaggtgaaacgtttgaaccattaacagattcaagagttggcctccgtgcaaaagactcattaggtaatgatattacgaaagatgtgaaaataaaatcaagtaatgtggatacttcaaaaccaggtgaatatgaagttgtatttgaagtgacagatcgttttggtaaatatgcagaaaaaacaattggagttatagtgccagtaattgatgatgaatgggaagatggaaatgtgaatggttggaaattctatgctgggcaagatattaaactgttgaaggatcctgataaagcctataaaggcgattatgtattctatgattctagacacgttgctatttctaaaacaattccactaacggatttgcaaataaatacaaactatgaaattacagtgtatgctaaagcagaaagcggcgatcatcacttaaaagtgacgtataagaaagacccggcaggtccagaagagccgccagttttcaatagactgattagcacaggcacattggtagaaaaagattatagagaattaaaagggacgttccgcgtaacagaattaaacaaagcaccattgataatcgtagagaattttggagctggatatataggtggaattagaattgtgaaaatatcgtaa

SEQ ID NO: 294 - DNA, 3711 bp, Bacillus thuringiensis
  source 1..3711: mol_type = genomic DNA
atggacccaaatgatcataatgaatatgaagtcatggatactggcagcatgggctatcagccaaggtatccccttgcgaatgcacctggtgctgaattgcaacagatgcattacaaagattggatggatatgtgtacgtatggggaatcagtagcattatccgaggggcttagggctgcgctatttgttgctaatagtattatagggataatgctttcaaagattccaattgtgggtcctatagtatcaacaccctttcaaataatgggcgcagtacttccattcttgtggccgccaaacgcacccgaggcccaattttcatgggaaagcctgatgacagctgcggaagagattgctgataaaaagatcgacgcacaggtacgagctaatgcgaatgcagaattagaaggagttcataacgctatacgactctatcaagatgccgtttgcgattggaaacaagatcctaccaatgcccaactgaaggaacaactccgaatacaatatattgctacgaataccgttatctttagtagaatgccgtcttttcgagtacgaggatttgaagtcccattactcagcacttatgtgcaagcggctaatttacatttaatccatttaaaagatggagttcaatttggagaagaatggggaatggactcagcaacagttgatcgattttatagctacctaaaatcagatatagaaatctatacgaattattgtatagattggtataataaagggttatcggatagtatagaatctgaacccacttggaatggttggaatacgttcaataatttccgcagggatatgactcttatggtccttgatttagtttcgatatggccaacatatgacccgagacgctatccccttcctaccaaatcacaattgacacgagaattatatacacaagctatagggagttataaaagtgttgagcctcttctgccccctccatctccatttagatggttacgtgaaatagagttttttttaagagacagtcaggatgaggtggaacagtttgctggttttcaacaggggtatcaatacacgcttgacaccaccatctatcgtccaccagtagttggtacacggacttccctagttgatagtattgctatgggactgggttctgatgatgtagtgtatagaataaagaatatttcctacaatggatggtttccaaaaaaacttgatttttattatactccttccgaacgcgttgaaagtgtaggagagattcgtactgatgctaataatatgattgattatatcggacttggttgtagggcgaaggtgactgaaccttgtgatccttgtacgactaattgtacgattgatactgtgaatacaaccgcatcttgtgacaatcctaatctttatagccatcgattgtcatcgataaacccaagtgctccatacccgggtcaaaattggatgtttagcttttgctacggctggactcatttcagtgtagatgacaacaatttgatagcggctgacagcattactcaaatccccgcagtgaaagcctatagaatagggggatatggcaaagtaatgaaagggcctggttatacaggcggggatttaatggtgttttatggggcaggggaaatcaactggagacttaccattccggacacgacaaaggcttatcgagtgcgagctcgtgtggcaacaatccctacttctcagcctgtagatacagtgaggtataatcagtttgaatacagggatatagaagtaatatctccaacaactactgtacatgagtattccataggattcgatatcactggtgatgactgggggctgttggacaaaatcgaattcatcccaattgaaggatccgtggaagaatatgaagcagaccaagctttagaaaaagccagaaaggcagtgaacgccttgtttacaggtgatgcgaaaaatgccttacaattgaacatcacagattacgcagtggaccaagctgccaaccttgtcgaatgtgtatcagaggagttccatgcccaagaaaaaatgatcctcttagaccaagtcaaatttgccaaacgactcagtcaagcacgcaatctattaaactacggagactttgaatcgtcagattggtctggagagaatggatggagaacaagtcctcatgtccatgtcgcatctaatcatccaatctttaaagggcgctatctccatatgccaggtgcgacaagttctcagttttctaaccatatctatccaacttatgtatatcaaaaggtggatgaatcaaaattaaaatcctatactcggtacatggtacgcgggtttgtcggcaatagtaaggacctagaattactggtagaacgatatggaaaagatgtccacgtggaaatggatgtaccaaatgatattcagtatacgttaccaaggaacgaatgtggtggctttgatcgatgcaaaccagcatcctatccaacaagcacttctcacacatgcacatgtaaagatacggctccaatgcatacggattgtcagtgtcaggacaagatgaatcgtactttggcagatacgtatcacaatgaatcatcgagtcgtgtgatgtatgcggacggattccatgctcatacgtcctgtggatgtaagaacagtgacaggtatcaaaacggaacacgtccatctaaatcttgtggatgcaagaacccacatgtcttcacataccatattgacacaggatgtgtggatcaagaagaaaaccttggtttgtggttcgctttgaaaattgcgagcgaaaatggtgtcgcaaacattgataacctagaaatcattgaagcacagcagttaacaggagaggcgttagcgcgtgtgaaaaaacgggaacagagatggaaacaagaaatgacaaaaaaacgtttagaaacagagaaagctgtacaagcagcgcaaggtgcgattcagaatctgttcacaaacgcgcagcacaatcgtctgaaatttgaaacgctattccctcaaattgtccatgcagagaagctcgttcaacagattccctatgtgcatcacccattcttgagcggggcgctgccaactgtaccaggcatgaattttgaaatcatccaacaactattggcagtgatcggaaatgcccgtgcattatacgagcaacgaaatctcgtgcgtaatggtacattcagctcaggtacaggaagttggaaagtgacagaaggggtaaaagtgcagccattgcaaaacacatctgttcttgttctgtccgaatggattcatgaagcgtcccagcagttacacattgatccaaatcgcgggtatgtgttacgtgtaacagcgcgaaaagaaggcggaggaaaagggactgtaacaatgagtgactgtgcagactatacagagacactgacctttacatcatgtgactttaacacgtctggttcccaaacgatgacaagtggtacattatctggatttgtgacgaagacgctagaaatcttcccagacacagatcgtatccgtattgacatcagtgaaacagaaggtacgtttaaaatagaaagtgtggaactcatttgtatggaacacatggaagaccacatgtatgatatcgccggaaatgtggtggaagagatgcgttacctagattcatctcgttcgatgggtggtacattagatgcgatgtgttatacaaaaattggagagtttggttgttag

SEQ ID NO: 295 - DNA, 1158 bp, Bacillus thuringiensis
  source 1..1158: mol_type = genomic DNA
atgttagatactaataaagtttatgaaataagcaatcttgctaatggattatatacatcaacttatttaagtcttgatgattcaggtgttagtttaatgagtaaaaaggatgaagatattgatgattacaatttaaaatggtttttatttcctattgataataatcaatatattattacaagctatggagctaataattgtaaagtttggaatgttaaaaatgataaaataaatgtttcaacttattcttcaacaaactctgtacaaaaatggcaaataaaagctaaagattcttcatatataatacaaagtgataatggaaaggtcttaacagcaggagtaggtgaatctcttggaatagtacgcctaactgatgaatttccagagaattctaaccaacaatggaatttaactcctgtacaaacaattcaactcccacaaaaacctaaaatagatgaaaaattaaaagatcatcctgaatattcagaaaccggaaatataaatcctaaaacaactcctcaattaatgggatggacattagtaccttgtattatggtaaatgattcaggaatagataaaaacactcaaattaaaactactccatattatatttttaaaaaatataaatactggaatctagcaaaaggaagtaatgtatctttacttccacatcaaaaaagatcatatgattatgaatggggtacagaaaaaaatcaaaaaacatctattattaatacagtaggattgcaaattaatatagattcaggaatgaaatttgaagtaccagaagtaggaggaggtacagaagacataaaaacacaattaactgaagaattaaaagttgaatatagcactgaaaccaaaataatgacgaaatatcaagaacactcagagatagataatccaactaatcaaccaatgaattctataggacttcttatttatacttctttagaattatatcgatataacggtacagaaattaagataatggacatagaaacttcagatcatgatacttacactcttacttcttatccaaatcataaagaagcattattacttctcacaaaccattcgtatgaagaagtagaagaaataacaaaaatacctaagcatacacttataaaattgaaaaaacattattttaaaaaataa

SEQ ID NO: 296 - DNA, 1164 bp, Bacillus thuringiensis
  source 1..1164: mol_type = genomic DNA
atgatagaaactaataagatatatgaaataagcaataaagctaatggattatatgcaactacttatttaagttttgataattcaggtgttagtttattaaataaaaatgaatctgatattaatgattataatttgaaatggtttttatttcctattgataataatcagtatattattacaagttatggagtaaataaaaataaggtttggactgctaatggtaataaaataaatgttacaacatattccgcagaaaattcagcacaacaatggcaaataagaaacagttcttctggatatataatagaaaataataatgggaaaattttaacggcaggaacaggccaatcattaggtttattatatttaactgatgaaatacctgaagattctaatcaacaatggaatttaacttcaatacaaacaatttcacttccttcacaaccaataattgatacaacattagtagattaccctaaatattcaacgaccggtagtataaattataatggtacagcacttcaattaatgggatggacactcataccatgtattatggtatacgataaaacgatagcttctacacacactcaaattacaacaaccccttattatattttgaaaaaatatcaacgttgggtacttgcaacaggaagtggtctatctgtacctgcacatgtcaaatcaactttcgaatacgaatggggaacagacacagatcaaaaaaccagtgtaataaatacattaggttttcaaattaatacagatacaaaattaaaagctactgtaccagaagtaggtggaggtacaacagatataagaacacaaatcactgaagaacttaaagtagaatatagtagtgaaaataaagaaatgcgaaaatataaacaaagctttgacgtagacaacttaaattatgatgaagcactaaatgctgtaggatttattgttgaaacttcattcgaattatatcgaatgaatggaaatgtccttataacaagtataaaaactacaaataaagacacctataatacagttacttatccaaatcataaagaagttttattacttcttacaaatcattcttatgaagaagtaacagcactaactggcatttccaaagaaagacttcaaaatcttaaaaacaattggaaaaaaagataa

SEQ ID NO: 297 - DNA, 3727 bp, Bacillus thuringiensis
  source 1..3727: mol_type = genomic DNA
atgaattcatatgaaaataaaaatgaatatgaaatattgaatgattcaaaaaaatctaacatgtcgaacccttatttacggtacccactagcaaatgattcactagcttctatgcaaaatacgaattataaagattggttaaccatgtgtgatagaactgatactgatgttttaagcagcagaggtgcagttagtacgggggtgggtatgctttctacgattttgagcctttttggcattccacttatcggagaaggaattgatttattactaggagcggcagatttcctttggccagaatccgatggcggccatcaatacacctgggaagacttgatgaaccatatagaagagcttatggatgaacgattagaaactgaaaaaagaactactgcacttgacgatttacgtggtctaaaagctcttttaggtctattccgtgacgccttcgattcttgggaaaaaaatcaaaacgacccgatagctaaaaatagggtcggcggctattttgaagatgtgcatacccattttgtgaaagatatggcgtctatattttcagctacaaattatgaagtattactattacctgtctatgcacaagctgcaaatttacatttacttttattaagagagggagttatttacggaagccgatgggggatagctccagcagctgatttctatcatgaccaactattgaagtatacggccatatacgcaaaccactgtgttacttggtataataatggtttagctcaacaaaaagaactgttcgcaaaatcaccaaactggaaccgcttcaatgcatatcgtagagatatgacaattactgtattagatatcattgcattattcccaacttacgacgctcgtttgtatacaaaaccaataaaaacagaacttacaagagaaatctattcagatgtattgaatttagatgtatatggggtacagcagacagatttgaataaaaatgaggccgccttcacacggtccccacatttagttacaagattacgaggttttgatttttacacaagaactaagtatgcatattggagatatttggctggccatacaaattatttttcttttacgggtaatggtactatttattcaagttcatttaataactggtatgatacagatatgaccaagagtacaataaacattccagactatgctaatatttataagttatggacaaaaagttatacgaatatatctccctatacggacccagttggtatctcacaaatgcaattctctctaacaaataatcagcagttaacttatacgggtacgagtgccccaaagtatcctgtacgcgaaacgttctttgaaataccacctacggatgagaagccgctaacttatgaaaattatagtcacattttatcttacatgactagtgctcaacattttggagataaaaaaataggatatacatttgcttggatgcatgaaagtgtagattttgacaatcgtgttgatccagataaaatcacacaaataccggcggtgaaaggggattatcttcaatatggatatgttaagcaaggccccggtcatacaggcggagatcttgtgtctatgattcgtactgatcgtttagggataaatgtttattttcctcaaccactagactatcgtatacgtattcgctattcaacaagtagtaatggttatctatatatttattcacctaatactaaaatagtatatctcccacccacaaccttagtagatggtcaacctacttttgacccgatggacttcagtgcattcagagttgtagaagttccagctagttttcgtgcaagtgttgcgggctatacaaactttactattgaagcagggtttggcccagtatatatagacaaaatcgaatttatcccagataatacaacaactttagaatatgagggaggaagggacctagaaaaaacaaagaacgcggtgaacgatctgtttaccaattaaaacaaatgattaactagagtaggtggtatcgctgttaaaaaaataagcggaaaaggttgtgaatcctatgtttatcagtaatataaaaaatacgctaaaaatagaaacgacagattatgaaatcgatcaagcggccatttctatagaatgtatgtctaatgaacattcttccaaagaagaaatgatgttatgggatgaagtaaaacaggcaaaacaacttagctggtctcgtaatttactctacaatggtgactttgaagatgtatcaaacggatggaaaacaagtaatacgattgagatccgagagaatagtcccgtttttaaaggacattaccttcatatgtttggggcaagagatattgatggaaccctatttccaacttatatctaccaaaaaatagaagaatctaaattaaaaccatatacacgttatcgagtaagaggatttgtgggtagtagtaaagatctaaaattaatggtaacacgttacgggaaagaaattgatgccatgatgaatgttccaaatgatttggcctatatgcagcctaccccttcatgtggagattctcgctgtgaatcatcgtcccggtatgtgagccaagggtatcctacaccagtaacagatggatatgcttctggtaggtatgcatgccagtccaatcgaggtacaaagcatgtgaagtgtcacgatcgtcatccatttgattttcatattgacaccggagaattagatacaaatacaaacgtaggtattgatgtcttatttaaaatttctaatccagatggatatgctacattagggaatctagaagtcattgaagaagggccactaacaggagaagcattaacgcatgtgaaacaaaaggaaaagaaatggaaacaacacatggagaaaaaacgttgggaaacacaacaagcctacgatccagcaaaacaggctgtagatgcattatttacaaacgaacaagagttacactatcatattactttagatcatattcaaaacgctgatcgactgatacaggcgattccctatgtgtaccatgcttggttaccggatgctccaggtatgaactatgatggatatcaagggttaaacgcacgtatcatgcaggcgtacaatttatatgatgcacgaaatgtcataacaaatggtgactttacacagggactaacgggatggcacgcagcagggaaggcaatggtacaacaaatggatggcgcttctgtattagttctatcaaactggagtgcgggggtatctcaaaacttgcatgtccaagagcatcatggatatatgttacgtgtgattgctaaaaaagaaggacctggaaaagggtatgtaacgatgatggattgtaatggcaatcgggaaacactgaagttcacttcttgtgaagaaggatatatgacaaagacagtagaggtattcccagaaagtgatcgtgtacggattgaaataggagaaaccgaaggtacgttttatgtagatagcatcgagttgctttgtatgcaaggatatgctagcaataataacccgcacacgggtaatatgtatgggcaaagttataatggaaattataatcaaaatacgagcgatgtgtatcaccaagggtatacaaacaactataaccaaaactctagtaatatgtataatcaaaattatactcacaatgatgacctgcattccggttgcacatgtaaccaagggcataactctggctgtacatgtagtcaaggatag

SEQ ID NO: 298 - DNA, 930 bp, Bacillus thuringiensis
  source 1..930: mol_type = genomic DNA
atgatttttttggcaattttagatttaaaatctttagtactcaatgcaataaattattggggtcctaaaaataataatggcatacagggtggtgattttggttaccctatatcagaagcacaaatagatacgtctattataacttctactcatcctcgtttaattccacatgatttaacaattcctcaaaatttagaaactatttttactacaactcaagtattaacaaataatacagatttacaacaaagtcaaactgtttcttttgctaaaaaaacaacgacaacaacttcaacttcaactacaaatggttggacagaaggtggggcgatttcagatacattagaagaaaaagtaagtgtatctattccttttattggagagggaggaggaaaaaacagtacaactatagaagctaattttgcacataactctagtactactacttttcaacaggcttcaactgatatagagtggaatatttcacaaccagtattggttcccccagccaaacaagttgtagcaacattagttattatgggaggtaattttactattcctatggatttgatgactactatagattctacagaacattatagtggttatccaatattaacatggatatcgagccccgataatagttataatggtccatttatgagttggtattttgcaaattggcccaatttaccatcggggtttggtcctttaaattcagataatacggtcacttatacaggttctgttgtaagtcaagtatcagctggtgtatatgccactgtacgatttgatcaatatgatatacacaatttagcgacaattgaaaaaacttggtatgcacgacatgcaactcttcataatggaaagaaaatatctataaataatgttactgaaatggcaccaacaagtccaataaaaacaaattaa

SEQ ID NO: 299 - DNA, 750 bp, Bacillus thuringiensis
  source 1..750: mol_type = genomic DNA
atggaaaatttaaatcattgtccattagaagatataaaggtaaatccatggaaaacccctcaatcaacagcaagggttattacattacgtgttgaggatccaaatgaaatcaataatcttctttctattaacgaaattgataatccgaattatatattgcaagcaattatgttagcaaatgcatttcaaaatgcattagttcccacttctacagattttggtgatgccctacgctttagtatggcaaaaggtttagaaatcgcaaacacaattacaccgatgggtgctgtagtgagttatgttgatcaaaatgtaactcaaacgaataaccaagtaagtgtaacgattaataaagtcttagaagtgttaaaaactgtattaggagttgcattaagtggatctgtaatagatcaattaactgcagcagttacaaatacgtttacaaatttaaatactcaaaaaaatgaagcatggattttctggggcaaggaaactgctaatcaaacaaattacacatacaatgtcctgtttgcaatccaaaatgcccaaactggtggcgttatgtattgtgtaccagttggttttgaaattaaagtatcagcagtaaaggaacaagttttatttttcacaattcaagattctgcgagctacaatgttaacatccaatctttgaaatttgcacaaccattagttagctcaagtcagtatccaattgcagatcttactagcgctattaatggaaccctctaa

SEQ ID NO: 300 - DNA, 792 bp, Bacillus thuringiensis
  source 1..792: mol_type = genomic DNA
atgcaccttaataatttgaataattttaataatttagaaaacaatggtgaatatcactgttcaggacctattattaaaaaaccgtttaggcatattgcattaacagttccatccagtgatataactaattttaatgaaattttttatgtagagccacaatacattgctcaagcaattcgtttaacaaatacatttcaaggagctatagatccacttaccttaaatttcaattttgaaaaagctttacaaattgcaaatggtcttcctaatgcaggagttacaggaactattaatcaaagtgtaattcatcaaacaattgaagtttcagttatgattagtcaaattaaagaaattattagaagtgtgctagggctcgttatcaatagtgctaatttttggaacagcgtagtatctgctattacaaatacatttacaaatttagaacctcaagtagatgaaaattggattgtttggcgtaatttatcagctactcaaacaagttatttttataaaattttattttctattcaaaatgaagatacaggtagatttatggcaatattgcctatagcatttgaaattactgtggatgttcaaaaacaacaattattattcattacaataaaagatagtgcacgatatgaagttaaaatgaaagctcttactgtagttcaagctttagattcttataatgcacccattatagatgtatttaatgttcgtaactatagcttacatcgtccaaatcataatattcttcaaaatctgaatgttaatccaataaaatcgtaa

SEQ ID NO: 301 - DNA, 7305 bp, Diabrotica virgifera
  source 1..7305: mol_type = genomic DNA
acaactgacacataacgtcagtagttgtctattttcactggtgactaatttttgagaattagtaattggtttcgtatttttttcttaacaaaagggcaaaatgagcttttttggaaaattgttcggggggaaaaaggaagagatagcccctagtcctggggaggctattcaaaaactcagagagactgaagaaatgttaataaaaaaacaggattttttagaaaagaagatagaagaatttaccatggtagcaaagaaaaatgcgtcgaaaaataaaagagttgcactccaagccctcaaaaagaagaaacgattggaaaagacccaactacaaatagatggaacccttacaactattgaaatgcagagggaagccctcgaaggagctagcacaaatactgctgtattagattctatgaaaaatgctgcagatgcccttaagaaagctcataagaatttgaatgtagatgatgttcacgatatcatggatgacatagccgaacaacacgacatagccaacgaaatcacaaacgctattagcaatcctgtcggattcaccgacgatctggatgacgatgaattagaaaaagaattagaagagctcgaacaagaaggattggaagaagacctgctccaagtgccaggtccaactcaactgccggctgtgcctgctgatgcagttgctactaaaccaatcaaaccagcagctaaaaaagttgaagatgatgacgatatgaaagaattggaagcctgggcctcgtaaaattcctgaaatctggatatttgtaaacgaaatcacccatctaagatgaaaacattataaatatataggtaataacagctaaaaacgtttcaatgtagaacaagcttttgctgaaaaggcgtcttgcaaaaaatgttgataatttagaattctctatatattatatatttgccctttaaggaaagatttcttttatagtcatagttcaaccaaacgtttcataaattagaatacaggggtgtcagaattctacgtgaatttattgaaaaaaaagaactttccttaaagttggcataatgatatttttgaaattatgtaaataggtatatgtatgctcttactaacggttttaatattgggtttagaagcaccttaattttatttttatacaaggtagtaacattttttcattgtaatttgttaaaaaatattgtataacgcaaaaaatggtgtgataaagcaaaatattattgagtgcttattttcttattttattaaaagatcttatttacgttaaatctaaatatattgggtatctcagaatatgttaacaaaggtttcttgtatcaacagaaaaatacaaacttattcattattgtggttcatttgattatgcttgtgtatatttaatctgccataaacaagttttgataaatgtcactgctctgtactttttgtttttctgactgtagtttctgtcgtttgtaattccttggtctcggccatcgcccatacacacatagggaatgttgtataaaagaaatgatagtagactagcaatggcccgaacagcaagaattaaataattaaaatatggaaagactgaatactaagctgagattggtcaaagcccttatttttcctattgctatatacgcagctgaaacatggactctcaaaaaaatcaatcgaagtaagatcgaagccttcgaaatgtaggtctacagaattattgtacccgtgtcctggagagaacacagaaccaacctgtcaattctgaaagagcttcatataaaagacaaggtattaaaaaaagtataccgaccatacttaaattactttggtaaagtaacgattactatacgaagaggcaaatcgttactttgattactctgattacttcgtaccaatcgtatcagagcgagtaacgactattgtatctactttgattacttcgtatcagagcgaataacgactattgtatctactttgattactctgattacttcgtaccaatcgtatcagagcgagtaacaactattgtatctactttgattattctgattacttcgtaccaatcgtatcagagcgagtaacaactattgtcagggccgcgtttaggtcaaatgacgccctaggcaattctctagtagccgcccttcaaacatgtaccatttttgcgaaaaaaaatgcaagcagaattttttatttaaataagaatgttattgcacaaatctcggtgttcttcaaataatgtttagaaatgtgttaaaaatattctttattttacatcaggcgtaatgttacatattactattataagtatgtttgagcgtttggaactgtgtccaatgcatgcgttttaatgcatgatacgtagaaattgcctgtttgtagccgcacctacttgttcgattttaaatgagagatgcattgaaaacattactcaagcactatgtgtttatagctttgtttaacaataaaaaaattaatttttagcaatgcaaataatcaaaaccggtataatttgacatgcactttcaaatgcggtaagcagaattgctattttattttttaatcaaaagttattcggattcaaaaattgcaatttttcgatattttgaaagttcaaccgcgtctatctcgaaaactatgcatcctacgaaaaaactttaacaacattttttgcttagaatgacccaaaaaaaatagaaaaaaggtttgttttgctaagaatcactgttatgtaattcctcaagttctttgtttataataaccttatccggaaaaaattagactgttttaataaatatctagacaaattgcatatttgtaatgtacacaaaagtacatacaaattaaaagttctaaaaaaataaattttgtaattttatgtcaactatcttaattgagtgcaaaaaatgcaagaaatcgcgttgattgcactaaattgttaataattaaaaacagacgcgaactctaggcaggaaacaagtaggttttcatcctataggtcaacagtcaacaataactaaaaacgtagtcatctacctcaatatttcagtggcccgaacatggtctattttttgcttatttccctggagtaggtatatcagtgtgacgacactaaccttatctacttgtaataatacagtttgaaaatcccaaccctaactcgatgtcctactgtcgacaagtcaaatctttagtttttgcaaaatgtgcaatattgaagtgttcaatggcccaccgcatttgcccagctgccggcggcctaataatcactaaatttatgacttccatcctttttaaatgaatagtgttaagataacagaatgctatgtttgatttatttttgttatgaatgcagtttgttttattctatttagaaatgaatgccaacttctatttcattgatggatgaacatacagacttgttattcgattttaatttttatatacaaatatttttttgtacagtatttttgccgccctctcacaatttgccgccctaggcaactgcctatattgcctaatggatacagcagccctgactattgtatctacaacctgtacacttaaatactttctaccaatcgtatcccagcgagtaacggacgagacacgtattttacgagtgttatcgaatatcgttatcggtttgaaacgttttaagggtgtgagggtgaggagaagatagaagatgaaacagagggagatataatgtataggtaaaatatttaatgtatgtcgctaacaaagatcgaatgcgagaaccctatatttttatctcgatctatatctatacctatacaaaatacctacctactgagaaatacgattctcgatatgattaccggtactcaaatacaaaagtcatcatagtaatcaaagtaacgaatactgtaaatgattactttatacaaaagtaacgatttgtaacgaatactcgacagtaactataatcaacatcactaatagtcggaagaacgtggactatataattattaatattagaaggaaatgccgaagaccaagaagaagatctcgaacacgatggacagaccaaattaagactctggtgggaaaatcacaatatgaaagcgtccatctggcacaggatcgcagccattggatacagcaagctaacaatatttagagtatcaccacgccccgacaaaggctcaaggaatgaggaggagagggttttcatattgaaactaattgtaaaggtgcgtcaagatatgctccgaatgccgtatcgaacctcctcgcgaacttaaatgtggacggcaccctgcaacaacgtactgaacctcgtcgcgatcagggtgcaacatcgaactgttccactagtttccggtaaatccatccacatcaaagtaaagggtcgtcgaaaggttcagaacgaggtttgccgtaaattcacatgtggactagtttgcgaagcattcggcgtttcggtcattgttattttgaaattgagtgcatcaacatggaatgaatggatgagaattgtactactaatagaaaattatcgagaaaacgaaatattatgggaaccaaagagtcccagatattataacaaaataaaaaaataatgcataagtatataagctgatgcagcaacgtccatcttgcagtaaaggtgttaaggcaattactgatggaacatcaaaatgttcggttcgttgcttatttcaagaccccttgcgacaacgtcgcgaacctctgttgatcgcttcgatgttcgcgacgaggttcgatacggcatggcattcggagcatgtgtggacgcacccttagtacaacgagttttatttctgtagaagttttttgacagtttacaaacggtgcgctctatgcttgtatgaaaattaacttttttcttatggttgtatggttatcaaatactattgactgtaaaacatccaactcccacaaaaatctggaagcacgttgccactagcgccactgtcggcttgagttgaactacgttttgacaacgtaaaatttgacgtaaacattcaaatttaattttataaatttttgaataacgagctaattttgctaaattaaattaaaataaaaatagttcaaacacttatacaaaaacaattataaagccattttataaatgtaaggttagattgctctggttatcctactcataccgctagatggcgctatttttttgcttcctcaaagttaatgggaaatgtcaagagttgtgtgtattacagtctatagtatttggtgatagtacggactatgtcataattataatttatgaggccaatcctcgccaatgaagaagtacttcgctgaatgaccggcaaaaggcgttaaaattctgtaaaatgtacaactgacaattatagttcagcgcaaatttaagtacatgcagcatagctgcatgctgcatgattcgcgaggttagtgtgtagagatccagacagcagctgtagattaaaagaaattattatcatgatgcgataggatgcgatggaaaagcttatgggtaaactatgagttaacaaaaatcctcaaatcgatacaagggtttgcaaaagatagttgtaatacgatctaagcaaatcgtacaatagggatgtagtatagtattaatacagtacgaaagtatttattttatattcggtttaaaatttactaaaaataaaataaaatgtcgcgttttagggttttctattatagaaactaccgtttctcaaatatcaataaattttattcaacggtcttccaatgactccatcccgttttctttggtgttcgtctgaaagtgttgcaaatgtctctgttatagccgcaatggcttcttgtttggacgacaagcactgataagaaaaactgacttaaattttaaaaaacagatgaaattctaagagaatcaaacctggaatttagatgggtcttccattacttcatagtgtagatcctcctaatccaagatattttgtggacagtttcattgtcctggcagaaaaggattagtgatcatctcatgatcttgaccttgtagaaaactctatattgttgaattccgatgaaagatgtgcgatatctgagcgattccaagagcttatcagactaccttagtaaatcatgtacagtaagcgccaccctactagatacatgggtaggtacctaattgctatgtttatgtgctagtccggtccgttctcaaatgtgactttcatccctgtcatgttactgtcaagaaactattcaaaataattgtttttccgtacaaaaaatacattaattaatagtattagtactctgctttaaaataactttattcaaacaccaagaatattacaatactttaaaacttttacaaaacaaaatgacaactataaacgtcaaaattagatcagctgatctattatttgtcaacttcatatgttaatattgtccttttcatgatcatttttcagtgcgtaacaaatgataggagaaagggtaagtccgtgataatacacatttatgacatttattctaacatgacattttagttaaatctgacagttgtcacattttattttcaatttggaataaaaacaaagcaaatgtgtttcttgcatttataaaatggtattttctttgatttgtatagtgtatagtcttataaattatacagattatatttgtaatattattatctaattaaaaaaaattatttttttattatggcgccatctatcgacaactaaaataactagaagaaatgttataaaaatgtcaccgacgaaatgtaatcaccgacgtgcttttttttctgtctcatacaagttaatgtgttagaaagaaatcgaaaaactgtgacgcactgaaagatgatcatgagaaataatttattcagtttctatacattttctgacgttctaaacgtcactagacataaataaacaagtgaagggtccaggactgtaatagctctatgttcctatgtatctagtagggtggcgcgcactgtataattggattattattcaatttgtctactgtaacgtctcggttcttaatacaactcctggctttttttatttattttttgtatttttttttcagggaaccttttttatctagttatttttttataataatagtaaaccatgatttttatttttttcccaattgagtgcatagataaaagcgcgtttgcatatatgggacacccagtattaaaaaatatgcattacatttttctttacttggaccttgtgtacctgtaacctacattcaccaaattgtgttttgtattctaattttaaatacagtaatatattttgattcactta

SEQ ID NO: 302 - DNA, 1093 bp, Leptinotarsa decemlineata
  source 1..1093: mol_type = genomic DNA
cattattgggttggcgacactgtgaatgactaatagtagttggtctatcagccataatttgttgcttgtttagtgcaaatatgagttttttcggtaaattattcggtggcaagaaagaagatgaaggggcctcgcctgcagaggcaatacaaaaacttagagatactgaggaaatgctcattaaaaagcaagactttctggaaaagaagattgaagaatatactctaatagcaaagaaaaatgcatcaaaaaacaaaagagtggccctgcaagccctcaagaaaaagaagcgattagaaaaaaatcagttgcaaatagatggcactttaactactattgaacttcaacgagaagctctggagggagctagtacgaacaccacagtattggaatctatgaaaaatgcagctgaagctcttaagaaagcccataaaaacttggacgtggacaatgtgcatgacatcatggatgacattgctgagcaacatgatattgcgaacgaaatctctaatgccatcagcaacccagttggattctcagatgacttggacgatgctgagttggagaaagaactagaagaacttgaacaagaaggtctggaggaagatttactcaaggttcctggaccgacggaattgccagctgtcccaactggcgccattgccaagccagtcaaaccagctaaaaaagtggaggaagatgacgatatgaaagaactcgaagcttgggcctcataaaatgttcatggttgctaggtttgttgaaattttataaaaatatgtaggcacccatctaacccaagagattcaaagttattaatatatcactgaagtggagttgaatatcttgtttattggtggtgtaaataagaacccaactcttgatttctcctccgaaggcttgggatgcttctccataatgtatatatatcttttattttgtttacaaaggacaactagcagggtcctcaaaagattaaaactccatttgttaggaattatatatttttagcataattgcagtaatttcagagttgcctagatgcaagcttttggtaattcaaatttttctttaataataaagtatatttaca

SEQ ID NO: 303 - DNA, 488 bp, Leptinotarsa decemlineata
  source 1..488: mol_type = genomic DNA
atggtcggtatgggacaaaaggactcatacgtaggagatgaagcccaaagcaaaagaggtatcctcaccctgaaataccccatcgaacacggtatcatcaccaactgggatgacatggaaaagatctggcaccacaccttctacaacgaactccgtgtcgctccagaagaacacccagtccttctcactgaagctccactcaaccccaaagccaacagggagaagatgacccaaatcatgtttgagaccttcaacacacccgccatgtatgtagccatccaagctgtactctccttgtacgcttctggtcgtaccaccggtatcgtcttggactctggagatggtgtcacccacaccgtaccaatctacgaaggttacgctcttccccacgccatcctccgtttggacttggctggacgtgacttgaccgactacctcatgaaaatcctcaccgagaggggttactcattcaccaccacagctgaaag

SEQ ID NO: 304 - DNA, 2472 bp, Leptinotarsa decemlineata
  source 1..2472: mol_type = genomic DNA
gtcagctgactgtcttgtgacaaatttacttgcttggttaaaagttgatagtccgtcgtcttgcgagttgtgaattgactgggtgaggttgaaagtgatacaagtctacattcataatgtcgagattaattgctgatgaggaacaggaatcacagtatggatatgtccatgctgtatctggaccagtcgttacggccgagaaaatgtcaggatcagctatgtacgaattggttcgagtaggatactatgagttagtaggcgaaattatccgtctggaaggtgatatggccaccattcaggtatatgaagaaacttctggagtaacggtgggagatcctgtgttgcgtaccggtaaacctctatctgtggaacttgggccaggtattatgggttccatctttgatggtatccaacgtccgctgaaagacatctgcgacatgacggaaagtatctacattcccaagggtgtgaatgtgccttcactctccagaactatcaaatgggaattcaacccaatcaacatcaagttgggatcccacttgacaggtggagatatttatggtatggtccacgaaaacacccttgttaagcacaaaatgatcctcccaccaaaatctaagggaacagttacatacgtggcagaaccaggaaactatactgttgatgaagttgtattggaaactgagtttgatggagaaaggtctaaatacactatgttacaagtctggccagttcgacaggcaagacctgttagtgaaaaactcccagctaatcacccgcttctcacaggacagcgtgtattggactctcttttcccatgtgtgcaaggaggaaccactgctattcccggtgctttcggttgtggtaaaactgtaatttcccagtcactttccaagtattccaactctgatgtcattgtgtatgtaggttgtggagagagaggtaatgagatgtctgaagtattgagagatttccctgaactgactgtggaaattggtggtgagaccgaatctatcatgaaacgtaccgccttggttgcaaacacctccaacatgcctgtcgctgcccgtgaggcttctatttatactggtattaccctgtctgaatatttccgtgatatgggttacaacgtttccatgatggctgactctacatcacgttgggctgaagctttgagagaaatttcaggacgtttggctgaaatgcctgctgattctggttacccagcctacttgggtgctcgtcttgcctctttctatgaacgtgctggtcgcgtcaaatgtttgggtaaccctgacagagaaggatcggtttctatcgtaggagcagtatctccacccggtggtgacttctcagatcccgttacttcagcaactttaggtatcgtacaagtgttctggggtttggataaaaaacttgcccagcgtaaacatttcccatctattaactggctcatttcttattcgaaatacatgagggctctggacgatttttatgacaagaacttcccagaattcgtatcactcagaaccaaagtcaaggaaattctccaggaagaagaggacctctcagaaattgtgcaactggttggtaaagcctctttagccgaagcagacaaaatcacccttgaaatcgccaaactgttgaaagaagacttcctccaacaaaactcctactcctcctacgacagattctgcccgttctacaaaacggtaggcatgctcaagaacatgatcggactgtacgacatgtcgagacacgctgtagaaacgaccgcccaatctgaaaacaaaataacctggaacgtaatcagagactccatgagcaacatcctctatcagctcagcagtatgaagttcaaggaccccgtcaaagacggagaagccaaaattaaagcagacttcgaccagctctatgaagacatccaacaggccttcagaaacttggaggattaagtgggggtcgcgtaggactgtgcagcttggggttttaggtttcgaagatgtttctctggaactgcacttggtcactatcagaaggcctctgtccctcactctgggtattgtcaaccagcggaagtagtaataatggggttttcccttttgatattatcatgtataataataaatcatgtaaatttttcgagtatgtgtatagtttttgagatttcttggtgagggtaagtgttgaaaactataatttttcccatcattccagttacttttaagtttgattttttttttcattgaaataggtgcttatcagttgtccagtattatcgatttcattgaactgtggccattttcgaaatcatttacacattttaaagctgttgtacattatatttacctttttaaagatatatcttactattgtacagtttaccatgtatccaatgtctagaggtttagaacttttgattgtagtgctattgttctgttttgaacgataataaacatacatactgttgtt

SEQ ID NO: 305 - DNA, 1686 bp, Plutella xylostella
  source 1..1686: mol_type = genomic DNA
atggcagcagtagcagcagcccagaagaaccgcgagatgttcgccatcaagaagtcctacagcatcgagaacgggtacccgtctcgtcgccgttcgctggtggacgacgctcgcttcgagaccctggtagtcaagcagaccaagcaaagcgttttggaggaggcccgtgcccgcgccaatgactctggcttggattccgaacttatccaagacgatgtcctgattggcaccggcgctgtcactccaactgttgaggtgggcactcagcaggacgacactaaagatggtcaactcgccgatgcggaggtcggtggaatagacggaaatgcagatgacgattacaccttgaccgaggaggaggtgatcttgcagaactccgccagcgagtccccggaggccgagcaggcgctgcaacaagcggctttgcttctgcgcctgcgcgacggcatgggctcgctcgcgcgcatcctcaagaccatcgacaactacaagggctgcgttcaacacctcgagacccgcccctccaacgccaacgacatccagttcgatgctctcatcaaagtgagcatgtctcgcggcaacctgctccaactcatccgatctctccgccagtccaccgccttcgccggcgtcgacctcatctccgacaacgtctccagcaagaccccgtggttccctcgccacgcttccgacctcgacaactgcaaccacctgatgaccaagtacgagcccgagctcgacatgaaccaccccggcttcgcggacaaggagtaccgcgcgcgcaggaagaccatcgccgagatcgccttcggctacaagtacggcgacccgatcccgcatatcgtgtacacggagaccgagaacaacacgtggtcgcgcgtgttcaacacggtgctggacctgatgcccaagcacgcgtgccgcgagtacaaggcggcgttcagcaagctgcagggggacgacatcttcgtgcctcaccgcatcccgcagctggaggaagtgagcaacttcctgcgcaagcacacgggcttcacgctgcgcccggccgccggcctgctcacggcgcgcgacttcctcgcctcgctcgccttccgcgtgttccagtccacgcagtacgtgcgccacaacaactcgcccttccacacccccgagcctgactgcatccacgaactcctcggccacatccctctgttggccgacgccagcttcgcccagttctctcaggagatcggtctcgcttctttgggagcctctgacgctgaaatcgaaaaactgtctaccgtgtactggtttacggtggagtttggtctctgcaaggagaaccagcaactgaaggcttacggcgccgctctcctgtcttccatcggggagctccttcacgcgctgagtgacaagcccgagctgaggtccttcgagcccgcgtccacctccgtgcagccctaccaggaccaggagtaccagcccatttactacgtcgctgagagcttcgaagatgccaaagacaaattcagacgctgggtgtcaaccatgtctcggccgttcgaggtgcgcttcaacccgcacacagagcgtgtggaagtgctggactccgtggagcagctcgagaccctcatctcccagctcaacaccgagatgctccacctcaccaacgccgtcaagaagctcaagggctcccacttcgagtga

SEQ ID NO: 306 - DNA, 1044 bp, Diuraphis noxia
  source 1..1044: mol_type = genomic DNA
cagaagattgttcaaacacatatatcgtcgtttcgttctggataccgattattcacaacatgggaagttacaaattatacctggccgtcatagcaatagcttgcatagctgcagtacaggaagctagttgctctgatgagcaggtacagtacgatgatgrggaagaagtgatcggattagagaaagagcaggaagaagtgtccgaaccagatatggaggaaaaagaagagccagaatcagagatggagtaccatcagtgcgaggaatacaaatcgaagatttgggacaatgcatttagtaataaggatgctatggacatgatgaaactgacgtttataacagctgagaaaatgggctccgacgccgtgtgcactgacacagcccgggccttcataaacttcatcgaagtgatggccaccaacagtaactcccaatacacgagaagtatgttcaaaaagttggtggcgtttattgttagagagttgaacacgacgtcggacaatttcagagagacgtcggaggtgttcgaacgtatctggacaactccagagattcgtgactttatcagggactcagtcactcggaccaataacgtgctcaaggagccccgtatgagaagccgactgttcaaagtgattgaagcagctatggatctgatgtcgaaatccaaagacggagaatcaatgaaacagaagtttaaggggatgtacagagctcccaccaagatggcaaggagtgccatggataaggttggaaatttctttcgaaaactttaataagaatgtccatacagactagtgatatatatatatatatatatatatatagcatatacatatagataaacataaagtgcagattttctaaaaaaaaatgttaacctaaaatctcacttccccgcctctctgagagtcgtcttcagtgttttgtacagtatcattacacattcggtatatctaacataccacacaccgcgttgttcttgcaataaatattgttattgttattattttattttgttctaaataaactcaattgattaac

SEQ ID NO: 307 - DNA, 3085 bp, Acyrthosiphon pisum
  source 1..3085: mol_type = genomic DNA
tgaacctgcaataatcgccgccaccgacgcgacgtacagaccggtccgtgcagtgtcccttagttgtacttgtgcgctttttgtgtgtcggtcacgtgcggatttcgcacaaacgttttgattttttcacatcgtatatctgttattgtctccacgcaataattattgcactcgccgcagtgttgcatccattcagtagaaacaatattggcacctattttatagaggctcgcgccgttcgtatttatagttattataaatatagtgcccgaacgacttcgggctcgtccgactttcgtggattttatatcattaatttttttatcgtcgtcgaaatgctgttaatcttgaatagtgatccgttgtcgtatccgtcaccgatccatgtgtcgacgatttaaatctagaagaaattcgtccaccacggtgtccaagacctcacactcactatttaccagccggctcgacctacaaatgacttattgttgatcgatcatcagagaaaactcgcacgcttaaacaaaaaatgtttttggaaaacgaacaccagccaattattagccattcaccgtacgacctagcacgtccacttgaacaccatcaccatcatcacctcaaccatcacgccgcgtccaatcatcttcagtcgagcaccgaccacttgcaagaagattcggaaggccggagtacggctagctcgccgacgtccagttaccgcgacctgtccgggtgcgaagactttgatctgaaaatcccgaaaccgtctggtcacgggtctggcactggtggaaataacaacaacaataaccacaataacaacaacaacaaggaacaaaaaccgaaaaagcacaagtgcaaacactgtgggctggagtgcacagaaaaggtgcagtactggaagcacattcgcactcacataaaacctgaacagttgctggagtgcccaaactgtgagttcgccaccgacctgaaacaccactacgaataccacctgctgaaccacacgggtgccaagccgttcacgtgcccggactgcgactacaagtgcgtgagcaagtcgatgctccaatcacacctcaagtcgcattcgaacgtgttccagttccagtgttacgactgtggttacgcatctaagtacatgcacagcctcaagcagcacctgaagaagcgcgaccaccggccggccacgccgctcaacccagacggcacgccgaacccggacatcgtcatcgacgtggtgggcaaccgacgcgggccgcggcagaacaagaaacaaaaccggcacaacccgtatcagcaacagcaccagcagcaacagctccagcagtctatgacggtgtgttcgtcgcaggacgacggcggcagcagtagcggcggccacccatcaccgtactcgatgcaacagctgttgcagatgcctgcttccggatgcgcccaagttacgtatccgacctcggccgagtcgtttatgtattcgatgatcactaaacgctccatggagatggttgattaccaggccgccgaatacatggccatcaagaacaacaacaataataacaactcctcgtcggtcgatgataagatggaagtgcaacagcaccaccaacaatcactacaacaccaccacaacaatcatcaccataaacgcggccatcagtaccattcagatgacgtgctgaaagtggaattggctgggcgtagcggtagtggcggtgaactgacgcccgaaccacatgtacctgtgttggcggtcgccgatccttcgcccccgaccgtcgttttggccatcgagacgggaccgttgaacttaagcagagactcagtggctcctcgcgccgcgggcagcagccggcgtaaggggatcgcgtgcaaactcgagcgaccggcaaccgaatcgcagcctaagtcggtgtcggtgccggtggtggttgttccggtgtcgcctgcagtaccgatggattgcagtagcgagtcaagaggaatggtggaggagactttgattccggtaaaggaagaatatcaacagtaccaccactaccatcagcagcagcagcagcagcagcagacgtcgtcattgtcttcgacgcctgaaaaagaagacaaggaagacgagacgcatgtgtgccaccactgtgacataatattcaaggagaacatcatgtactcgatgcacatgggtttccacagcttcagggacccgttcgcgtgcaacctgtgtggcgagataacggcagataagttttcgtttttcgctcacatagcgcgcgtgccgcacagttaggctgcaattagaagacgcacctacgaaagatacgaaataataatagagtacaaattttaaaacaattaaccctttaggtatgtaatataggatttatcgtaagaaaaaattaaaacagattaagaatataaagtaatgttacataggtactatattatacatctctttctttttaataactgtcccccccaaacctaagagtgtagttacgccgcacccatgcttcgtacaaatgaaaatcgtttttggcgcttagctaaaaacgattttaatttgtatacctacgcggccggtgttgttgaacggttccggttcttaaacgttgatttcaacttatcaacgtgtaagagtcggcaccgtgtcttcaaatcgtgattgcgcacattaatcgtcgagatgcttagttgtttatcgttttaaatatttttttctcgttatatttttctcggaaataaaattttaattatgttttaattttattttcgaggaataaaagccatcgccaattttagcgatttaaaaatgtttaactcgtgtcctcatagttaagcacaaattattagtttatttgttacatgtaaattttattatccttaaaaataacttttttaactttccaattacccaagattgaatcaataatgacaaatattgattttttttacgtttaaataccgtaatacctcatcttcttcattattttttattgtttgatctagtcgttaaactatttctcctcgtatactatagtttagtatcgtgtatacctatgcacttatgatagatactattaaaaataaaaaa

SEQ ID NO: 308 - DNA, 2383 bp, Botrytis cinerea
  source 1..2383: mol_type = genomic DNA
atgtcctataatcgattagatccggcgggccaaggccaagacgattattacaatatgaataatagacatcaatcgccgcaccctcaagggtaccaactagaagatgcgccatatggcagaccaaatactacttcacccggtcctggaatgcacaatctagagatacctatgggtcctggggcacatagaattggaacgccgagtgatcaattgcaagctcaaccatcttattcggtcgaacatttagatcaaaatcaataccatcagcgcatgtccctcaatcccagtcaaagctacgactcggaatattctttagatcctaacgcgcatcacgatgcttactaccaacctccataccaaccctctcctcatgaagaacaccctctacagaactatgccccagggcaagacccctacgcttacaatgatgatgatgaccatcaaccaattctacaatcgcatgaaccttatgggccagatccgcactcagctagtggcactgattacaaaggtggttatgacgggacggtacaatctccatcagcgacacctgtacctgcgttgagaagatacaagacggtcaaggaagtccaactgttcaatggaaatctcgtactcgattgtccgattcctcccaagcttttaaatcaagtcaatcatgcaccaccgccggagagagatgagttcacacatatgagatattcagccgcaacatgcgaccccagtgagttttttgaggagcgctttacattgcgacaaaaactctttgcaaagcctcgacacacagaactcttcatcgttgtcacaatgtataatgaagatgatgtattgtttgctagaacaatgcacggagtattcaagaacattgaatttatgtgcactcgtaaagacagtaaaacatggggcaaggatgcttggaagaagatcgtagtgtgtgtggtcagtgatggacgtgctaaaatcaatccaagaacaagggctgttttggctggtttgggggtttatcaggacggaattgcgaagcaacaagtcaatggcaaggacgtgacagcacatatctatgaatatacgactcaagtcggaatttctttgaaaaaggatattgttacactcacaccaaaacagcaacccgttcaattgcttttctgtttgaaggaaaagaatcagaaaaagatcaactctcacagatggttcttccaagcctttggtagagtacttgatcccaacatttgtgtactcctcgatgctggtacaaaaccaggaaaggactcaatttatcatctatggaaagctttcgatttggaaccacattgtgcaggagcttgtggtgagatcaaagctatgttgggcccaggaggaaagaatttggtcaatccattggttgctacccagaatttcgagtacaagatgagtaatattctggacaaacctcttgaatcggcatttgggttcatttcggtgttgccaggtgctttttctgcatatcgatatgtcgctttacaaaacgataaaactggaaatggaccactggagaagtactttgcaggagagaaaatgcatggagcaaacgcgggtatttttactgccaacatgtaccttgccgaagatcgtattttgtgtttcgaactggtatcaaagagaaattgtcactggatcttacaatacgtcaagtctgctactggagaaaccgatgtaccagatacaatggcggaacttattttgcaacgtcgaagatggcttaacggaagtttcttcgctgctatctatgctcttgctcatttctatcaaattttccgaagtgatcacagctttttacgaaaaatcatgtttttgattgaattcacatatcaaactattaacatgatcttcgcttggttcgctcttggtaatttcttcttggtttttcacatcttgactacatctctcggaagttctgacttactgggtaacgttggtgtaattcttggtgttgttttcgaatggctttacttgtttacgcttttgacctgttttattctggcgctgggaaatcgacctcaaggaacgaacaaagtttatatgtctatggtttatttctggatcattatcatgatatacctaatgtttgcttcgattttcatcacagttaaatcaatccaaactcaacttgctaaagacgaattcaactggacggatattatcaagaatcagatcttctatactctgatcatttctctcgcctcaacttatctactctggttcatttcttcctttttattcttcgacccatggcacatgtttacatctttccttcaataccttcttctcactccacatatatcaatattctcaacgtttacgcttttctgtaacactcacgatattacatggggcacgaagggaa

SEQ ID NO: 309 - DNA, 2736 bp, Botrytis cinerea
  source 1..2736: mol_type = genomic DNA
atggcgtactctggaaacggaggctatgatgagcataagctccaagaccttccacctggagggggcaactaccatcaccctcaagatgaagaggaaggagctttacctttactcgattctggaggacatggcggcccattcaacagcccttacgactctcactcccaaggaggccttcgagcgaatactcctccagtcagacctgtttctgcctacagtcttacagaaacgtatgcgaacgatccacaaccatacagcagcgattacaactcatcccacacatacaatgagcagttagaagataacccatacccacaaaccgacactcctttgtcaagagccgggactacctccacagaggcatggagacaacgacaagcccctcaggctggaggtctcaaacgttatgctacaagaaaggttaagcttgtccagggaagcgtcttgagtgtcgatcatccagtacccagtgctatcaaaaatgcaattcagcaaaaatacagaaatgatttggagggtggcagcgaggaattcacacatatgcgttacaccgctgcaacttgcgatcccgatgaatttactctgaaaaatggttacaatctacgacctgccatgtacaatcgtcatactgagttgctcattgccgttacctattacaacgaagacaagcagttgactgcacgtactcttcacggtgtcatgcaaaacatccgtgatattgtcaacctcaagaaatctgatttctggaatgtcggcggaccagcatggcaaaaaattgttgtctgccttgtttttgatggtatcgatccttgcgacaaagacacactcgatgttcttgctacaattggtatctaccaagatggtgtcatgaagaaagatgttgatggaaaggagactgttgctcacgttttcgagtacacaacacaactttcggttactgccagtcaacaacttatccgcccaaccgagggtgatgccaactgtcttcctccggtgcaaatgatgttttgcttgaaggcaaagaacacaaagaagattaattcccatagatggctgttcaatgcatttggtcgtctccttaaccccgaagtttgcatccttttggatgccggtacgaagccaggacctaaatcgttgttgtctttgtgggaaggtttctacaacgacaaagatctaggaggtgcttgtggagagattcacgctatgttaggaaagggaggcaaaaagcttctgaacccgcttgttgcaggtcaaaacttcgagtataagatcagtaacattcttgacaagcctctagagagttctttcggatatgtcagtgtgttgccgggagctttctctgcataccgattccgagctattatgggacggcctcttgaacaatacttccacggagatcacactttgtccaagattcttggaaagaagggtatcgagggaatgaacattttcaagaagaacatgttcttggccgaggacagaattctctgtttcgagcttgtagccaaggctggtagcaagtggcatttgacttatatcaaggcagctaaaggagaaactgatgtacctgaaggagctgctgaattcattggtcaacgtagaagatggcttaacggttcctttgcagcaggaatgtattccatcatgcatttcggcagaatgtacaagagtggtcacaatattgtccgcatgttcttcttgcacattcaattcttatacaacgtcttctccaactttctcagttggttcatgttatcttctttctggctcactactactgttattatggatcttgtcggtacccctactgctgcttcggacactactgcccttcaccatggctggcctttcggtgatactgctacccccatcatcaacacgattctgaaatatctctacttgggattcctactcgttcaattcattctggctcttggtaatcggcctaagggatccaaggctacttatattgtctcctttgtcgtttttggtgttatcaatctctacgtccttgttctatccatgtatctggtcgttcgtgctttctcgtcaggagatagtctcgatactagtagtgcgaaagatttctttgagagtttcttcggagatagttcgagttccggagctggtatcattattcttgctttagctgctacatttggattgtacttcgttgcatccttcatgtatatggatccatggcacatgttccattctttcggaccgtacttgttgctcatgtcatcttacatcaacattctcatggtgtacgctttcagtaattggcacgatgtttcttggggtaccaagggatctgataaagcagaagctcttccgtcagctaaaactacgaaggttgatggtaaagcagcagtcattgaagaaatcgacagaccgcaagaggatattgatagtcagtttgaggcaactgtcaagcgtgctcttagtccatttgttcctgaagttgaagatgagagtaagaccttggaagattcttacaaatctttcagaaccaagcttttgatctcttgggtattctcaaacgcgttgttggctgttgctatcactagtgacagtgttgatggatttggtttcggaaatactgcatcaataagaactgctaagtttttcgaaattttgctttactcaacggctttcttggcacttattcgattcctcggatgttcttacttcttgttcaagtctggtatcatgtgctgcttcatgagacgttaa

SEQ ID NO: 310 - DNA, 2715 bp, Botrytis cinerea
  source 1..2715: mol_type = genomic DNA
atggaaacatcaaggagctggaatagttcggctgaaaactatcctatgaatgaacttattcaacattcaaacaattctgttactgatcctgctacacagttagataacactgatcatattagtgatgtacatcactcaaatgatgctcatgatgttggtgaaagtttgctatcagatactagtggctaccatccaacaacaccctatgtgactggtactgggcaggtacaacgtcaacgttcaccaaccagctcagtgaacggtgaggaatttttcggggatcaacaccatcttccagatatcgaccaggacttctacagaagccccgaagactcctttaatgcgcaagacatgccgtccgcgaacggtgctcgtggagctcttcggcgccgcgctactcgaaagattaaactgattcaaggcggtcagggatctgtcttgagcgcaaactaccctgtaccaagtgcaatcaagaatgcattacagccccagtacagagatatagagaatggtaccagcgagttctcagagatgcgatacaccgcggtaacttgcgacccgaatgattttaccttgatgaacggttatacactacgccagcacatatacaaccggcacaccgagcttttgattgcaatcacctactataatgaggacaaggtgctattcgctagaaccttgcatggtgtgatgaagaacattcgcgatattgtgaatctgaagaagtccaggttttggacgcagggttccgcagcatgggagaaaattgtcgtctgcctagtgttcgacggtttcgaaaaggcggatccaggtgtgctcgatctcctcacaaccgttggagtatatcaagacggcgtgcgaaaacaggatgtggatggaaaggagacgacagcccatgtcttcgagttcacgacacagttatccatcactcccgacctacagctttctcgtcccaattcggatgtggatgattccagtaacttgcctccagtacagctcctcttctgtctcaaacaaaagaataccaaaaaaatcaactcgcatcgttggttgttcaatgcctttggacggattctcaacccggaagtcaccattttgatcgacgcgggaacaaaacctggacctcgctctttattggccttatgggaggcattctataacgacaagaaccttggtggcgcatgtggtgagatccacgctatgcttgggagccggaactccaagttactaaatccgcttgtggcaatacagaatttcgaatacaagatttcgaatgttcttgacaaaccccttgagagctccttcggctacgtcactgttctccccggcgcattttcagcatatcgctttcgagcgatcatgggccgtcccttggagcaatattctcacggcgaccatacgttgttgtctggcaagaaaagtatcaacaacatgaatatttttaaggagaatatgttccttgcagaagatcgtatcctttgtttcgagctagtagtgaaagaaggacagaattggcacttgtcttatgtcaaagctgccaagggcgagacagacgtaccggaaggccctgctgagtttctcagccaacgccgccgttggctgaatggatcatttgcggcctcgctatactcgcttattcacttcggtcgcatgtacaaatccgggcacagtctgctccggatgataatgtttcatttccagctgctatacaacattgccaatgttatttttagttggttctctttatcatcctattggctcactaccactgtcatcatggatcttgtcggtacacctgtaactgcatcgaactatcacggctggccgtttggcgatactgcgtcccccatattcaaccacgttattgaatatatttaccttgcgtttgtgatcacacaattcattctggcccttggaaatcggccaaagggatcgcaagtgacctatctggtgttgttcgtggtgtttggatttattcagctctacatcatcattctgtcattctatctggtttaccgggcactacggactcccattggggaacagatcgacacgtcttcggccgcagcattctttgagagcatgtttggaggaacgggagtcgccggcgtgattttactagccttggtcaccatttacggcttgaactatgttgcctcgttcctctacttggatccttggcatatgtttcactccttcccgcagtatatcattctcgcttcgacatatattaacattttgatggtgtatgccttcaataactggcatgatgtttcttggggcacaaagggctcagatgaaagcgaaaagctcccttcggccaatgtgatcaaagactcgaaatccggtgtcgagatggtcgaagaagaggagatgcaacaaacagatattgaccagaagtttcaggagaccgtgctaagaactctggcccctgtcgaagtggaagttaccgtagaaaccaaggaggtcgatgacacgtataagtcgtttaggacccgcttggttgtctgctggatcctgtcgaatatgctgctggtcgggattgtcacctcggatgatttcgcatttcttggcgttggtcctctacgacccggaccgccatactacttcaaatttcttctatatgccactgctttcttgtcgattatcagattcttagggtttctttggtttctcggacgaacaaacattatgtactgctttgcgaagaggtaa

SEQ ID NO: 311 - DNA, 4648 bp, Botrytis cinerea
  source 1..4648: mol_type = genomic DNA
aaaccttccttccgagccaggatatcgagctttcgacgtcttctactacctcctcacatctgcatcgactcctgccgaacgagaattcttgagcttaaagcaagcttctagttacgcgcttctagaaaagtctggaacatatggccctccaccgtaccttcctactgcggatgatgctgctgctgcagacgacttcagagcatcattaaaagctattggtatcaagggtgccgcacacagagatctcatctcaatattagcaggattactaaagctaggtgataccttgagctttgttcttgatggggatgcgttggaggaaatttgtgaggatgttggaggtctgcttggtttggaacccgatgttctcgtcaagcaatgcacaacccaagagcgagaaactttgatcggtggtctctatgaagcccttgtagattgggtaattctgaaggccaacgaagccattgctagtgagatgctcaggatcaaggacggtgattcttccagtgaagggggaccaggagctcgaaccccaaatacagaagacgacaatggtgatactgtctgcataactgttcttgagattccagacccaaatcctgggaaagcggctgcagtgcgaggtgtctttgacgatactcagggtattaattccgaaatgaaagaagatggtgtggatgtagtttctgctggctcaacggttatccgagagatgcaaaatgctgtatccgaagttgctccagatctcggtatcatgactggaccttctgggagagatcgtgaacacgagcttgagaagcgtgagatcgtattagagaaggttgcccgcgagggagaagatgatggtttcctcaagaagcttctgctcccaatcgagggtcaaggtattaacctaggccgcaacggtcgtattgacctaccttccgttcttggtagcagtcgcgtctggtatcacttatctatgcatccgaccgacgattcacccgcagctctcgcttcgcttccttcaacaacttcggcttggtccgcgggtgctatctcacgccaactccgcgcctggcgtttgccagagtgggcaaatcgacgaaacaaaaacttggattttacagccgatttcgatttcgaagaatttgttcaacgatatgccccccttggttgtaaggatggccgtgatggcattgaaagctgggtcatggagcgtggttggagcaatggtgaagttgtcataggcaaagagcgaatatggatccgcgaaagtgcttggtgggaagctgaaaccatgcttgacctaaagccggccgaaggggagttccaaagtatgggcggtcctggaggcatggcaggcatgctaggagcccacgacatgaacacaggatactcctccaacccaccaaatggaagtggtttctttgccggtcccaataatgatctgacgcctcttgggagtcacgataatatgatgaatcgacaaagtcaagtcaacgtggcccggagtaacctcggggctcccaccatcgcaccatcaagaaatatcagtggtggtgactatggactcggcttcaagggagataatacgaggggccaggtttattacactgatgagaatggagaaatggtggatgatcccgaaggtggcaccccgaaagctgtcgtcagcgaggcagcaacaaaccagcgtcgtatctgggccgccattacctgggctttcacgtggtggattccttcattcctcctctcatttattggtcggatgaaacgaccggatgtacgcatggcttggagagaaaagctagtgttgtgtttctttatcctcttcatcaatgccttggttattttctggattattgaatttggtaaactcctctgtccaaattccgataaagcgtggaatgcaaaagaagtcgctactcatcaaggagataacgatttttgggtcagcattcatggaaaagtatacgatctttccaagttttggaagttgcagcacagtgataccactgtcgagacaacctctgatgttatgcaaccatttgctggtttgaacttggacagttacttcccgccaccattgactgttgcatgccctggccttgtaaccgattacaccgtggttttactggacaatagtactgttgaatatccttccggggtccatacatctggcaacctttcagcatatacaaccagtaaactttacgactggaattggtatgcggacgtgtacacacctgcaatcaaagagtattaccatggtgatctagtggtcaagaatagtgcgatcaagagtgaaggccaaaatgaaaatcattattgggttatatcacgagtgatggatgacaattacaaaacagccaacgcatcttatcaagtggatatcctcaacaacttgaattgcatgaacaatttgttctatgcaggcatccctgattttcgagattctattagatgtcagatcaacaactacatccttctcgctttcacaattattgtgtgtgctgtcattgtcgtcaagttcgtgtctgcacttcaatttggttcgaagcgtcgtccaactcctcaagacaagttcgtcatttgccaagttccagcatacaccgaaggtgaagactcattgcgtaaagctttggactctgttaccgctctacaatacgacaataaaaggaagctcatctgtgtcgtttgtgatggcatggttgtaggaggtggtaatgatcgccctacaccaaagattatcctcgatattctcggtgtagatcccaagatcgaccctccagccttaccgtttaaatccgtcggagatggcaacgagcaactcaactatggtaaggtatactcaggtctatacgaatttgaaggaaatgtggtaccatatattgtagtggtcaaggttggcaaggaatccgagcaatccaaatcgaagcccggtaatcgtggaaaacgtgacactcaaattattctcatgagtttcctcaatcgcgtccatcacagagcacccatgaacccattggagttggaaatgttccatcaaatcaacaacattattggcgtagatccagaactttacgaatatctactgatgattgatgccgataccagtgtaagggaagactcgctgaatcgtctcgttgctgcctgtgtcaatgacggtaaaatcgctggtatttgtggcgaaaccaatcttgaaaacgaagagcaatcttggtggactatgattcaagtttacgaatatttcatctcgcatcatttggccaaggcctttgaatctctattcgggagtgtcacttgtttacctggttgttccactatgtatcgtctacgtaccgctgacaaaggcaaaccattgattatcgctgatgccatcattgacgagtacagtgagtgtgttgttgatactttacacaagaagaatcttctgtctcttggagaggatcgattcttgactacgttgatgaccaagcacttcccatacatgaagtacaagtttattccagatgcatacgctagtactgccgcacccgaaacctggagtgttcttctttctcagagaagacgttggatcaattccaccattcacaatctagctgagttggtccgacttcctgaactgtgtggattctgttgtttcagtatgagattcgtcgtcttcatcgatctgttcggtacaattattcttcctgcaactacagtctatctaggatatctgatctacaaagtcgcaacgcatcaaggtcaattccctctcatttcgatttgtatgattgctggtacatacggtttacaagctttgatatttattctcaaacgtcaatggcaacacattggatggatgattatttatatccttgcattcccaatttactctttcattttgccaatctactcattctggaatcaggataacttctcgtggggtaacacacgtattgtcctgggagaaaagggagctgcaaaggttgtggccgtggacggcgctgaatttgacccaagaagcattcctcttcagcgatgggacgattacgcctcacacaacaaccttccaggacgtcgtggagtaccagtcgaaaaggcatacgatacattcgatgatcaatacgaaatggatgacatgaaatccatgtactcatctgtcaagccagcctccactattttaactggtttccctggtcgcggtccatacatgcctcctcaatctacttactccgcaaaccaatacactgaccaccctgtccgcaatcattctgcaatgtcccttcgccaacaagatcgttccgcctcaccatatcaagactaccctggcaacaatcgtccttcgatgcaaatgatgtcttcggataatcttctcggtggtggtccaggacgacatcaatcacgctcgtcggtaggcttcacaggtggtgctcgttcaccattagcaggagctggtattgatagacctgctagtggatttgatttccaaaggggtaccgccggtccagatgatttgcagattgtagaggctattcaaaactgcttgagggaggtagatctagataatgttacgaagaaacaggttagagctttggtagagcagaggttgcagacagagttggttggtgagaggaggacatttttggacaggagtattgattctgagttggctgctatgtaa

SEQ ID NO: 312 - DNA, 259 bp, Botrytis cinerea
  source 1..259: mol_type = genomic DNA
catttcggaggcggtcgaaactcgccggtttcatgcgtgcctctcacttcttcagtgaagctcgaaggaaccacgcttgaccaagttaatatgttcaccctatgtctatttcaggatgtgttcagcaaagcttacaaatcgaatcctgatagtatgccgtactttttggttcctatcaattgtccaaatcacactggggactggaaagattatgagcccatgtcaataattgattgggaaactgttcaatatgtccaag

SEQ ID NO: 313 - DNA, 200 bp, Botrytis fragariae
  source 1..200: mol_type = genomic DNA
gcatggcaagaggcagaacataatcctggaattgttcgtacatctattatgagcctcgatgatttaaagattgagctctgccttccgatcgagccaccaccaattccgcccttgacacttcactggaattccagcacagagctgtctgtcgagtttacaaacgatgccgaaataggaaccaccgaggacatgatattacg

SEQ ID NO: 314 - DNA, 210 bp, Botrytis cinerea
  source 1..210: mol_type = genomic DNA
agaagcagattgttattttggccatctcaccatcatcgcagatggatatgcctccaaattccgcaagcaatacatcaacaaaactcccattgtcaaaagtaaattctacgctctagaattaatagattgtcccatgccagctcccaatcatggaatcgtagtcctctcggacgtctccccagttctcctctatcaaatcggtacccacga

SEQ ID NO: 315 - DNA, 254 bp, Botrytis cinerea
  source 1..254: mol_type = genomic DNA
gcgaagttgatggagcaaaagaagttcatgaaaattggcttgtctacagaagctttccgatcctacgtcccaatcatacaaatggaggtggaaaactttatgaagcgttcttcggcgttcaaaggtccaaagggaactgctgacattggtcccgctatggctgaaatcaccatctacactgcttcgcacactctgcaaggaaaggaagtccgcgatcgattcgatacctcctttgcctctctctaccacgacct

SEQ ID NO: 316 - DNA, 209 bp, Botrytis cinerea
  source 1..209: mol_type = genomic DNA
ttcaacgctgtcaactgggtagaatcatctgcatgggatggaagagacgccattgtcgttgctggagatattgctctatatgccaagggtgctgcacgtccaactggaggtgctggagctgttgccatgttgattggaccaaatgctccagttgttgtcgagcctggtcttcgcggatcctacatgcaacatgcctacgatttctacaa

SEQ ID NO: 317 - DNA, 186 bp, Botrytis cinerea
  source 1..186: mol_type = genomic DNA
gtctggctaagcctagtcaattgaatgcgttcattcgttatagttcacagcagactgaaagtcatgatacgttaacagagacaactcgaaatattggcatcatagctcatatcgatgcaggcaaaactacaactactgagcgtatgctctattacagtggctatactcgacgcataggagacgttg

SEQ ID NO: 318 - DNA, 1610 bp, Fusarium oxysporum
  source 1..1610: mol_type = genomic DNA
atgggttttaatccgcaaggccaaggcaacggcccaaactatgatgcgccacgggaaatgcaagatttaccagctggccaagcttaccactttcgcgaatctgacgaaacagccgccgctcgtgtttctcctgtgagcaatccttacgaaccagactatgatcaattgtcccctccccctccgctgggcgcacaacgacccgtgcccgagcagaatgagtcgagccgcgatcttctacacagttcataccaaggcagcgtaggccataacagctttgacggccatagttttggtcacaatagctatggacctggtgcttttgggcattatcctgctgaccagcacggtcgcatgcctgggtctccgggctacgaatacccagagcctgagtacgatgtcgaagcttcgcgtttggcagaatctcgtctctccgtcatgcatcgcgcccctacgatgcaagattggggtcagaatggcgaggctctgtctgttccagactttgcccacggacgccccgactcaacgtaccaggagttcgatgtcgacgagagctggatgatgcgacagcagcagaaccaactcgcaggtggtctcggtcgctcaaagacccgtaaagtcaagctcgttcagggctccgttctcagcatcgattaccccgtgcccagcgccatcaaaaacgccgttgaaccgcgataccgaagcggtcccggaagcatggaggaggagttcacaaagatgcgctacacagctgctacatgcgaccccaacgatttcaccctgcgaaacggctttaacctccgccccaagatgtacaaccgtcatacagaactgctcatcgccatcacctattacaacgaggacaaggtgctacttgcgcgtaccctccacggaacgatgcagaacattcgggacattgtgaacctcaaacgctccaagttctggaacaagggcggtcctgcgtggcagaagatcgtcgtttgtctcgtctttgatggtatcgacaaggtcgacaagaacgttttcgacgtgctcgcgacggttggtatctatcaagatggtgttctcaaaaaggatgtcaatggcaaagaaaccgtcgcccatattttcgagtacaccagccaagtctccgtgacacccgatcaacagctcgtccgtcccgatcccgacaagcctcatcgcaatctcccccccgtccagtttatcttctgtctcaagcagaagaacagcaagaagatcaattcgcatcgctggctcttcaatgcctttggccgcattcttaacccggaggtcgccatcctcattgatgccggaacgaagccggccccccgcgccctgctgtccctctgggagggcttctacaacgatcgtgatctcggcggcgcctgtggagagatccatgtcatgcttggcaagggtggaaagatgcttctcaatccactcgtcgcggtgcagaatttcgagtataagatctccaacgtcctcgataaaccgctcgaaagtgcctttggatatgttagtgttttgcctggtgctttctcggcgtatcgcttccgcgctatcatgggtagacctctggagcagtactttcacggcgaccatacgctctccaa

SEQ ID NO: 319 - DNA, 4677 bp, Fusarium graminearum
  source 1..4677: mol_type = genomic DNA
atggcgagacgaatgtccatgtattcgatggcctccgaggctatgggcggtcctcaagctccccagcagatgtctaccacgactctcctgaatgccatccacaacatctacctgtcttctcaaccttatcagatcgatgccggtactagtctggttgtcaacacatggctcacagctgctcaggctggtgctactgttgatgctaccctcgctgctcgagcctgggagcatgctaggcgtcgtgctgaagatggatgtgttgttttaggttcactccaccaggcaactccctcgcttctcgtgccgttcctgaacactttcccgttcgccattcccgcatccatttacaagtcattggaggctgtacaaccgtttctccgatgtgtcactccatacaacgcttcggcccctcgacagatcgcactcggcgttacactgacattgagtttgggaggaagtgtcacaggagcctctctggccttgtctcaaggtggaatcgatactgagaatggattgctcaacgttcctgccgaggctggataccgtgcttttgacgttttctactatttgctcacatccgcctcgacacccgcggagcgagagtttctaggcctcaaggcgccttcagcgtatgctctccttgctcgctcgggtacttacgagcctccttcttacctcatcaccgccgatgatggtgccgctgccgacgactttcgccaggcactcaaggagattggtatcaagggatctgtccaccgtaacttcatctctaccttggctggacttctcaagcttggcaacactctcgactacgatgccgattccgacgatttcgaggagatctgcgaagatgtcagcggtcttcttggtatggagcccgaggttctcatgcaacagttgagcactgaggatcgacgaacacttgttgctggcttgtatgaggctctcgttgactgggtcatttccaaggccaacgctgccattgccgctcagatgctccgtatccgagatggcgatgagtctgttgatggtcgtggcgtccgcactccaaacgaaaacgaggatggtgacaccgtttccatcactgttgttgaagtccccgaacccgctctcggcagggctttggccatgcgaaccattttcgacgacactttgggcattaacgctgagatgattgaggatggtgtcgagatccaccctgcttcatcttctgttgttcgggagatgcagcaggccgttgccgatgtcgcgcccgatctgggcattatgactggtccccagggccgagaccgccagcatgatattgagaagcgagaagtcattttagagaaggctgcctacgcttctgaggaagacagcttcctgaagaagttgttgttccctgttgagggtcaaggcatcaacttgggccgaactggtcgtttcgatctaccaggtctcctgagctctagccgtgcctggtttcatctcgctctgcatcccacagacgattctcctgctaacttggctacccttcctgctatcacctctgcgtggtcagctggtaccatttcccgacagctccgttcttggcgtcttcctgaatgggccaaccgtcgtaacagaagtctcgactacacagctgattttgatgtagacgagttcgttggtcgttacggcgcactaggctgtaaggatggcaaggacggtatcgagacttggatgctcgagagaggctggagcaacggcgaagtctttattggcaaggagcgaatctgggtccgcgagggtccttggtgggaggcagagagcatgctcgacatcaagcctgctcacagtcttcaaagcataggtcaaaatccgttcacatccggttttgacacaagctactcagccaacccacccaatggcagcggcttcttccctgctcccgctatggacaacagcatgaatggcagcaatgaccagctcatgcatacccgtaatttcagccagggcaacatgagccaagccactttcaaccaacaccctcacttgaaccctcaatcagcaccttcgattgccccatctgctatgcgcaatgctcagcccgctaccggtgactacggtctcggtaacaagggcgacacctacaagggacaggtattctataacgatgatggagacttcactggtaagcttgatggagaccttgccaaggacaagaagatcgaaaccaagcccctgacctttggccgacgagcttgggttgcttttgtttgggccttgactttctggattccttcacctcttctcaagtttgttggacgcatgcgacgacctgatgtccgtatggcttggcgtgaaaagctcgtcttgttcttcattatcctccttcttaacggcttgattatcttttggattatcggtttcggaaagcttttgtgtcccaacgccaacaaggcatggaacgttaaggaggttgctggccatgcagaagatgaggatgctttctgggttgctatttttggcaaggtttacgatatcaccgacttctggcgacaacagcacagtgataccagcattaagaccaccaagacgaacatgttgcccctcgctggtatggttatggataactacttcatgcctcccctgaacagagcttgcagaggcctcggcatcaaggagactgttcaactcaccttcaacgagactataacgaaccctcttgcacagcatgtttctggtttctacactcgcgaccgtaccagtgctcttcacaacgctgactggttctggacgactttccagcccaagatcaaggaatactaccatggtgatctcgtttggaaagaaggcaccgttaagagccagggctcaggtagcgagcagcatccatgggtcatgtacggtaatcagatctacgatcttacggattatctgcacaccctagatgtcaacgacaacttcgatacctacaagttcttgaacgaggacatggtcaacttatggaagaacagccccggtaccaacatcaagaaggatcttgaccttctcatttccaacgcaaagaatgagactgtggccgccaaccttaagaacagttggcagtgcattcaaaacattgcgtacaagggtatcgtcgatttccgtgactcaccccgctgccgtgtcaacaactggctccttttggccttcgccattatcatctgtatcgtcaccgctgtcaagttccttgctgctctacagtttggttccaagcgacgtccttcgccccaggataagtttgtcatctgccaggtgcccgtctacactgagggtgaagattctcttcgaaaggcattggactcgttgacggctcttcagtacgacaacaagcgcaaacttatctgtgtcatctgtgatggtgtcgtcgtcggtgaaggcaacgatcgtcctacacccaagattgttctcgacattctcggtgttgatcccaaggttgatcctcctgcgcttcccttcaagtctgttggcaacagtgccgagcagctcaactacggtaaagtttactctggtctgtacgagtttgagggcaacgttgttccatatatcgttgtcgtcaaggttggcaaggagtctgaacagaccaagtctaagcctggtaaccgtggaaaacgtgactctcagattctccttatgagcttcctgaaccgtgtccatcatcgcgctcccatgtctcctctcgagcttgagatgttccatcaggtcaacaacattattggtgtggaccccgaattgtacgagtaccttcttatgattgatgccgatacctgcgttgaggaagacgccttgaaccgtcttgttgccgcctgtgcccacgacgcaaagattgctggtatttgtggtgaaaccgccctggagaacgatgaaaagacttggtggacaatgatccaagtttacgagtacttcatttctcatcatcttgccaaggcctttgagtctctcttcggcagtctaactcgtcccagtttcaccatgtaccgtcttcgaagtgttgacaagggcaagcccctgattatctctgatggtgtcattaaggattacagtgtttgcgacgtcgacaccctccacaagaagaaccttctgtctcttggtgaggatcgttatctcaccaccctgatgaccaagtacttccccgagatgtcctacaagtttatccctgatgctcagtgtaagactgctgcccctgaatcttggagtgttttgttgtctcaacgtcgacgatggatcaactcgaccatccacaacctggttgaacttatgcaactcaaggagctctgtggtttctgctgtttcagtatgcgcttcgttgtgtttattgatcttaccggtaccatcattctcccttcaaccaccgtctacattggttacctcatctacgtcttggctaccggcactggacccattccgtacatttctcttgctatgattggtgccgtttacggtcatcaggctctcatctttattctcaagagacagtggcaacacatcggatggatgattatctacatccttgctttccctatctactccttcattcttcccctctactccttctggaaccaggacaacttctcgtggggtaacactcgtatcgtcattggagagaagggtgacaagcaggtcgttgctgttgacgatgagggcttcgatcctcagtttgctggcgaaaggtag

SEQ ID NO: 320 - DNA, 6546 bp, Fusarium graminearum
  source 1..6546: mol_type = genomic DNA
gaactcaaaccaccaaaaaccaaccctcgcctctcccctttgctactctttgcattacgcattgccgacactcgttttacggcttcgtcaaatcactccgtctcgcccttttttgcgaccgagactacacaagccggtgaatcactttctcgtgattgattcgtctttttgaacttgaatcgacgccaaattacatctttttcgttggcctttcggaccagagtcacctctccctaagccatttgacgtttttgacgacaacatcttgcagtgccggtcacgcttgttcttccgcctgatcttgaatcacatcacgctcgttgatcatccacatgtgtatctctagataatctaataactcaacatgtcgggatatccgggcggtggtcaacgcgaccactatgacgatggctacggccaccctcagggaggcaaccaacagcaaggtggaaacacggattcctactatcaagacgatcaatactatgatcaaggctatgacaaccgcggccacaataataataacccgaataacaacagcaacaacaacaacgagggctactatgacgaatctggttattacaacgccgaccctaacaacccttatcaacatgacggaggctactacgacggccacgaccagtatcaagatggctattatgacaatggccagggtggatactacgaccaggactatgatcgtgggcaccaaggacagggtgcccgtcaaggctctgaggaagattccgaaacgttcagcgacttcaccatgaggtcggacatggctcgcgctgccgagatggattactacggccgcggggatgaacgttacaacagctacaatgacgggcagcgtggttatcgacctccctcctcccaaatctcttacggtgggaatcgctcgtctggcgcatcaaccccgaactatggtatggactatggcaatgctctacctcctggccagcgttcccgggaaccttatcctgcctggacttccgatgcacagattccgttgtcgaaggaggagatcgaggacatctttcttgacctttgttccaaatttggtttccagcgagacagcatgcggaacgtgtacgaccatctgatgatccttctcgactcccgagcctctcgaatgacgcccaaccaggctcttttatcccttcacgctgactacattggcggcgataacgctaattaccgcaagtggtacttcgccgctcatcttgaccttgacgatgccgtcggatttgccaacggtcttggaaagggtaggaagaagaagggtagcaagaagaagaagaaagacccagaggccagtgaagccgagactttacaggatctcgaaggtgacgaaagcctcgaggctgctgagtatcgttggaagacacgcatgaacaagatgtcccagcatgatcgaatccgacaaattgctctgtaccttctctgctggggcgaagccaaccaggttcgcttcatgccagagtgcttgtgttttatcttcaagtgtgccgatgattatctcaattcccctgcatgccaggctctcgttgagccggttgaggagttcaccttccttaacaatgtcatcacccctctctaccaatacttgagagatcaaggttacgaaatctctgatggtgtatacgttcgacgtgagcgtgaccacaagaacatcattggctatgacgattgtaaccagcttttttggtaccctgagggaatcgatcgcatcgtcctgcacgacaagagcaagcttgtggatgtgccaccagccgagagatatgtgaagctcaaggacgtgaactggaagaagtgcttcttcaagacttaccgcgagtcccgttcctggttccatcttctggttaattttaaccgcatctggatcattcatttgaccatgttctggttctacacctctcacaatgccccaagtatcctggttggtccaaaatacgaacagcagcttaaccaacagccctcaacagccaagtcattctctatcgtagggttcggtggtgctattgcttctcttattcaggttcttgccactctcgccgaatgggcctatgtgcctcgtcgatgggccggtgcccagcatcttaccaagaagctctttttcctgttgtttatcctggtactcaacatcgctcctggtattaaggtcttctttcttgagggtattggtggaaagaagatcgacactgccattggtatcgtccatttcgttatcgcattgattacgttcttattcttttccgttatgccacttggaggcctttttggcagttaccttgctaccaacaacaggaagtatgttgccagccaaaccttcactgctagctggcccacgctccgtggtaacgatatggcaatgtcctatggactctgggctgtcgtctttggcgtcaagatgggtgtttcatacatctacttgattctgtccttccgtgaccccattagatatctaagcatcatgaaggtcaactcttgccagggagacgctcttctttttggaaatcagctatgcagatggcatccaacaattgttctggcactgatggcattcactgacgttatcttcttcttcctggatacatacctttggtacgtccttctcaacaccgtcttctcggttgcccgatcattctacatcggatcttccatcttgacaccttggagaaacgtcttttcccgtcttcccaagcgtgtgtactccaagatcctcgccaccaccgacatggagatcaaatacaaacccaaggttctcatttctcaagtttggaacgccatcgtcatctccatgtatcgggagcatctcctcgctatcgagcatgtccagaagctattgtaccaccaggttccttccgagcaggagggcaagcgaactctgagggccccgaccttcttcatctcgcaggaagatcattctttcaagaccgaatatttccctgcttacagtgaagccgagcgtcgaatctcattctttgcccaatctctgtccacacctatcccggagcctttgcctgtcgacaacatgcccacgttcactgtcatgattcctcactacggcgagaagattcttctgtctcttcgtgaaatcattcgagaagatgaaccatactcacgagttacacttttggaatacctgaagcagcttcatcctcatgagtgggattgctttgtcaaggataccaagattctggcagatgagacctctcaattcaatggagaaaacgacaaggacgagaagaacactgccaagagtaagatcgatgatttgcctttctactgcatcggttttaagtcttctgcgcccgagtacaccctgcgcacccgtatctgggcatctcttcgtttccagactctctatcgtactatctctggcttcatgaactacagccgtgccatcaagcttctgtaccgcgttgaaaaccccgaggttgtccaaatgtttggtggtaatactgataagcttgagcgagagcttgagcgtatggcccgtcgtaaattcaagattgtggtttccatgcagagattctccaagttcaagaaggaagagatggaaaacgccgaattcttgcttcgcgcttatcccgacctacagattgcttatcttgacgaagagcccccagttgcggagggcgaagaacctcgtctgtactccgttctcatcgatggtcactctgaggtcatggagaacggcatgcgacgtcccaagttccgtgttcagctctctggtaaccccattctcggtgacggcaagtctgacaaccagaaccactctatcatcttctaccgtggtgaatacattcagctcatcgatgccaaccaagacaactatctagaggagtgtctcaagatccgaagtgtcctcgctgagttcgaggagatgaagaccgacaatgtctccccttatacccctggtgtcaagaacaatgtctcctcgcctgtcgctattctgggtgcccgtgagtacattttctccgagaacattggtattctaggtgatattgctgctggaaaggaacagacattcggtacactattcgctcgaactatggcacagattggtggcaagcttcattatggtcatcccgatttcctcaacggtatctttatgacgactcgaggtggtgtttcaaaggctcagaagggtcttcacttgaacgaagatatttacgctggtatgaccgctctcctccgtggaggacgtatcaagcaatgtgaatacttccaatgtggaaagggtcgtgatttgggtttcggctccgttctcaactttacaaccaagattggtactggtatgggtgaacaatttctgtctcgcgagtactattaccttggcactcagcttcctctggatcgcttcttgtccttctactacgcccatcctggtttccacttgaacaacatgtttatcatgttctcggtacagatgttcatgattaccatggtcaacctgggagccctccgtcatgagactgtggcctgcgagtacaaccgaaacgttcccatcaccgatcctctctaccccagcgggtgtgccaacactgatgcgcttacggattggatttaccgatgtatcgtgtcgattcttttcgttctgttcctctctttcattccccttattgtccaggaactttctgaacgtggcatttggcgtgctttcattcgattgatgaaacagttttgctcgttgtcgctcatgttcgaagtcttcgtctgtcagatctacgcgaactctgtacagcagaacatttcgttcggtggtgcgcgatatattggtacaggtcgtggtttcgccacggcgcgcattccctttggtgtcttatactctcgattcgctggaccagctatttacttcggcgctcgtttgctcttgatgcttctgttcgcgaccctcactgtctggaagggtgtcttgatttacttctggattacccttcttgcgctgacaatttcgcccttcctgtacaatccccatcaattcgcttggaccgactttttcatcgattaccgagattaccttcgttggttgtcgcgtggtaattcccgcagccacgcttcatcttggatctcgtactgtcgtctttctcgaactcgtcttacaggttacaaacgcaagacacttggagacccgtctgccaaagcatcagctgatgtccctcgagcccctttcgcaaacatctttttcagtgagattttctcgccattgatgcttgctgttgtaacgattctgccgtatctttttgtcaacgctcaaaccggtgttactaagcagagcaatccaaacttcagaggcaagatccaaccgacgcaatcgctaatgcgtctactcatcatcgcttttgcgcctgttgccgtcaatgcaggtgtcttggctgctatgttcggcatggcttgctgtatgggacctctcctcagtatgtgttgcaagaagtttggcagtgttctcgcagctattgcccatgccacagctgtgatcttccttcttatttccttcctgggcatgttcattctggagagctttaacttcacccgcactgtagcgggtatgatcgccgtggtctcgattcagcgcttctttgtgaagcttattgtttcgacctgtctcactcgtgagttcaagggcgacgcgtctaacatcgccttctggagcggaaagtggtactcgatgggatggcacacaatctctcagcctgctcgtgagttcctttgcaagatcaccgaactttccatgttctctgccgatttcgttcttggccactggcttctcttctttatggcgcccgtcatcttggtccccaagattgatactcttcactctatgatgctgttttggcttcgtcccagtcgccaaattcgaccccctatatactcgatgaaacagtccaagcttagaagaagacgtgtcatccgctatgccatcctctacttcaccctcctggtcgtattcatcgctctcgttgctggacctgctgtagttggtaaactcatgggcgaatcactcagcaagaccatcgaaaagatggttcctatgcagggtcttgtgcagcccaactatcttcacaacaacaacactaacagcaccttggcaactggtatcaagaaccctagttacaccggcgctggtctcacaatgactggcagcaagcgcgtccaggcctcggctactggcaagatcaagctgttttgagcgaaaaaagactgggagacagggtctgtctttttggacatttctcggacacagtcgtcgctctctgttcctatgcacagaagaaagttatcaaaatatgaagtttttgctttttcgtttttgcttttgcttttcagttcagtacctagcacaggtggatgcgtatgtacacattttgcattttatttagaagcggaagggtggtgagaggtggaaaggaggtcagcaacacaagccagacctgacctgacctggcattcactggttgaactgaagtggtctttttttgttggcacaaggcgcacctttttaacttattctaatgtgtacaatgaaaggaagcaaca

SEQ ID NO: 321 - DNA, 3504 bp, Fusarium graminearum
  source 1..3504: mol_type = genomic DNA
atgaacgacgatgacgcgattcacaacatccacaagaagatagagcgggaaaaggccctcatcaacgctgccaattctatgagggcacagacaaacaatgaagccgttagatcccgtctcgactcccagatgcgcgatggccgccgcaacctccagtttttcgaggagaagcttagggatattcagctgcgccgtgtgaaccaaggtgttggagacatgtctctcgggggacctgctgacgatgccggtggccctcccgcaccacctcctaaggatgcctccagcaatcccgcgggagatagaggttcctacggctctggttcgggacagtacagccaggctggcggtggttccgacttaatgccccctcgtcatccttatgcaccgggacctggtggatcgggtattcctaaggcacgccccaactttaccaagttagacttaatcaaatatgatacgccacacctgggccctcgtattcaactcatgttgtcccagatccagttcaagctcaatgtcgaggagcagtacctgaagggtattgagaagatggttcagctttatagcatggaaggtgatcggaagagcaaagccgacgcagccgctaggaaggttgaaagcaagcagaagattctactgttgaagcaggcactcaagagatatgaagaactgcatatcgacgcggacgttgcggatgcacaagatggtaagttggcgttgaatgacgtcgaatgtgaagctgacaaagagttagatgattcaatcaacgcccccaacctcaggaagcccctcagtggacaactctcgattcgaatgatagcaatcaaagatgttgaccatgctgcgactggacggttcacgagaggtcccgagacctttattgccgtgaaggttgaggataccgtcatggctcgtacgaaagcgtccaggaacgatcgatgggaggctgagttccatactatcgaagtcgacaaggccaacgaaatcgagttgactgtctacgacaaacctggcgaacaccccatgcccataggcatgctctgggttcgcatttccgacattgttgaggaaattcgtcgcaagaggattgaggccgaaatgaacagctctggctgggtgtctgccgacagaatgggcagcaccagtgctgcccctacacagttcccgatgagtccttcttcaggctcttttggaccaggtgctcaatcgactggtggtgaccaaggggatgatactggcccattcggagctgctggtccccagcctcaggtgcaaactggacctatcgaggaatggttcaatctcgagccaactggacagatccaacttcagttgacatttaacaagtccaacaacaacagccgccctgccgaccttggtcttggtcgaaagggtgccgttcgtcaacgaaaggaagaagtccacgagatgtacggacacaagttcgtgcagcatcagttttacaatatcatgcgctgtgcgctttgcggagatttccttaagtactcagcaggcatgcagtgtgaggattgcaagtatacctgtcatacgaagtgttattctagcgtcgttacaaagtgcatcagtaagagtaacgctgagactgatcccgacgaggaaaagatcaaccaccgcattccgcacagattcaacccttattccaacatgacagcaaactggtgttgtcactgtggttacatcttgccttttggaaagaagaactgcagaaagtgctcagaatgtggtcttactgcccacgcccagtgtgttcatcttgtccccgatttctgcggcatgtcaatggccgtcgccaaccagattctggacggcataaggactcagaagcaaagacaagccaaggtttcttcactttcagaaaagacacttcgacatggcaagactagcccgacaagcaccagctcgccggctccctcatactccagcacgactgctccttcttaccagtcaggaccagtctccccggaggctacagaggccgctaagatgatgtactcgaacccttccacgccgagacctgccggccctgatcgaacttcatccagctcccaagctgcggctgcagcatctgcggctatgtctggaggacctggtgcggcccaacggcagaactcagactttgggcgatatagcggcggttacgatcaaccgcaagaagacccctatgctcaaggaggtcaatacggcgcgggccagcagcgtaagtacaacccggccgattatgcgaacgtgaaccctggctacggaggaccacagcctgctgctcaggctcagcgacctgtacagcagcagccagcccaacaacctcctcctcagtcaccgctacctccagtaccgcaacaccaacaacagcagccacaggctgcctaccaacagcccgcagtgccggcgcatagccctcagcaaccagaacccatgtctcctaagcagcagtcagcggctggtggtaagtctgctcccttggctactgaccctggaactggccagcgtatcggacttgatcatttcaacttcctggctgtgttgggcaagggtaacttcggtaaagttatgttggccgaaaccaagcgctctcgaaagctctatgccatcaaggttctcaagaaggagttcatcatcgagaatgatgaagtcgagagtatccgttctgagaagcgtgtgttcttggttgccaaccggggcagacacccattcttgaccaacttgcatgcatgcttccaaacagagacccgtgtgtacttcgtcatggagtacgttagtggtggtgatctgatgttgcacattcagcgaggtcagttcggtactaagcgtgcgcaattctacgccgccgaggtctgcctggcgctcaagtacttccacgagaacggtgttatttaccgtgatttgaagcttgacaacattcttctctcacttgatggtcatgtcaagattggtgattacggtttgtgtaaggaggatatgtggtatggctccacaacaggtaccttttgtggtactcccgaattcatggccccggagattctcctggacaagaagtacggccgtgctgtcgattggtgggcatttggtgtgctgatttaccaaatgcttctgcagcagtctcctttccgtggagaggatgaggacgagatttatgacgctattctcgccgatgagcccctgtaccccattcacatgcctcgagactcagtctcaatcctccagaaattgctcactcgtgagcctgaccagcgactcggaagcggcccgactgatgcccaggaggtgatgagccagccattcttccgaaacatcaactgggatgagatgtaccacaagagagtgccgccgcctttcatgccgcagatcaagagtgcgacagataccagcaacttcgactccgagttcacaagcgttactcccgttttgactccagttcaatccgttttgtcacaggccatgcaagaggagttccgaggcttctcatacacagctgattttgactaa

SEQ ID NO: 322 - DNA, 5592 bp, Fusarium oxysporum
  source 1..5592: mol_type = genomic DNA
atggctatgagcctcccacagctcggcggcgcaggaggccctcacactcaaccctctttgccatcgttgccagcacatcttcaatccgatacgcatctcactgctcatctcgccagtcgcttccatgtctcgcatcctaccgctcgactgtcttctcacgctctcatctctctcaacacctataccaactcctcaaagggtcccgatggcggcaaggaggggagcgccatggctggcgccgaggaaatcgctgacagagcttttctgcgattaggacacagatccgagaaccaagccgttgtgtttttgggtgaatctggcgctggaaagtctactattcgagcccacctcctgactgctcttctcaacaaatcatcgacgcctctgtccacaaagctctctctcgccgcatatgtctttgatagtctcacaactaccaagactgccacaacacccactgcttccaagtccggtctcttctacgagttgcagtacgatacttcagccacaacaaaccctgttctgattggtggtaagctcttggatcatcgtctggagcgtagccgtatcgccgatgttcccacaggagagcgtaacttccacgttctttactatcttcttgccggaacaagcgaggctgaaaaatctcatctcggcttggacggtggttctgccactggaaccactcaaaagcgatggaagtatcttggccatcctactcagctcaaggttggaatcaacgatgcagagggtttccaagttttcaagaatgctctgcgaaagctcgagtttcctcgcgccgaaattgccgagatatgccaaatcctcgccagtattcttcacattggtcaactagagtttgagacaactagccagaccagcgtcactggcgatgatagtggtggtttctctcacgagggtggtacaaccattactgctgtcaagaacaaggatgttctcagcatcatcgctgctttccttggtgtcagcgccgctgacctccagaccactttgggctacaagaccaagatgatccaccgagaacgtgttactgttatgctcgaccctaacggtgctcgtgctcacgccggagagcttgcccgaacactttactctcttcttgtggcttggattcttgagaccattaaccagcgactttgtgctcccgaggagtccattgccaacactgtctcgatcgtcgatttccccggtttctgccagcaaactcccactggctctgcgctcgatcaacttctcaacaatgctgctaccgagtgcatttacaaccttactctccagaacttcttcgaccgcaaggctgatatgctggagtctgaggaagtcagcgttgctgcgaccagctatttcgataactcggacgctgttcgaggcatcttgaagcccggcaacggtcttcttagcattctcgatgaccaaactcgacgaaaccgaacagatatgcaattccttgaggctcttcgaagacgtttcgatggcaaaaacgctgctatcgaggtcggctctgcccaagctaagcttcctggaagcaacttcatgactgagaacacatctgctgtcttcaccgtcaagcactttgctggtgaggttgattaccccgtcaagggtctcatcgaagagaacggcgagatcatctctggcgatctcctcaacatgattaacggcactaagagcgagtttgttgcccgccttttcggtcaagatgctctccagactgtcactcaccccaatgaacgcactaccgttatgcaggctaccgtcagctcaaagcctatgcgagcgcctagtgtcatgtctcgaaagacgcatcgaactggtcgtcctagcacagcttacaagcgccagcagcaagaggccatggaggagttagatcagcagagccaggctggagagtctaagaagaacgccaagatgactctcgagcaaggtgcttcaggccagttccttgcctccctggacaatgtccagaaggctgtcactgaccctggcaccaactcatacttcgtcttttgcttgaagcccaacgatcgacgaattgcgaaccagttcgacagcaagtgcgttcgtatgcaggtccaaactttcggtattgcagaaatcagccagcgtcttcgatctgctgatttcagtttgttcttgcctttcggcgagtttctgggtatgacagacccggagacaatcttggtcggcagtgaacgagagcgtgctgagatggtcattgaagagaagcagtggccccagaatgaagtcagagtcggtgccactggtgtcttccttagcgaacgctgctggatggagattgcccagcttggcgaggcagtgtcagtttctggtcgctacggcggcttgccttcatcagatgctggtgatggtctcacacctgctgagtctatggctttcggtgcctccaaggaacatttggtttctggtggcaacacccctctcatgtacggtgagaaggccaagggtggttacttcactgatgacactcgatccgaggctggtgtttctgcctttggtggcggtgacatgttcaagaacctcgacacacgcgagcagatggctgagcgaggcaatgagaagtctctcgaggaggttgaggagtatagagataagcctagccgcaagcgttgggtggctctcgtcttcttcctcacttggttcatccccgattttgccatcagactgatcggacgtatgcctcgaaaggatgtccgtatggcctggagagaaaaggtggcgatcaacatgctcatttggttgatgtgtgctgtcgccgccttcttcatggtcggattccctatgctcatttgccccaagcagtatgtctacagctccaacgaactctcttcctacgacggtgacaagggcagcaagggcgcctacgttgctatccgcggtttcgttattgacctcaatgccttcattcccaaccattatcctggcagcaacctcgtcagcgaggatactctcttgaactatgccaggcaaggatatcatgcgctcttttccccatccaagtgtctgcctctgtgccagggcaaagatggtcagatccctcctgaggttactctcgacaaccgaaacaccaacatcactggtcagccccagcttcttgcctccagagatattgatgtcaactctgtctaccacgatttccgttatttcaccaatgacagccgacctgattggtacttcgagcagatgtacaccttcaagcatgtctacctcaagggacgaatgggttacagccctaagtatgtcaagaagctggcccgagatagctcttggaacgttgtcactatccacgggaaggtttacgacatgaccaagtacctccagggtggtctccgtttgaaggccaaggctggcaagcctactcccaacatcccaggtgccacagacttcatggaggacagcgttgtccagctattccgaagtgcaaagggccaagacgtttccaagtactgggataacatcaagcttagccctgtcaaaaaacaacgcatggagacctgcctgaacaacctcttctacattggtgactcagatactcgaaactccacccgctgtcagttcgctacatacttcatcttggctatttcagtcatgctcgcatctatcctggtcttcaagttccttgctgcgctccaattcggtggcaagaacgtgcctgagaacctcgacaagttcgtcatgtgtatgattcccgcttataccgaagatgaagactcgttgcgtcgtgctatcgactcgctttctcgcatgaagtatgatgataagcgtaagcttctcgtcgttgtctgtgacggtatgattatcggtcagggtaacgacaggcctacgcctcgcatcgtgctggatattcttggtgtcccagagactgtcgatcccgagcctctcagctttgagtctctcggtgagggtatgaagcagcacaacatgggtaagatctactcgggtctttacgaagtccaaggccacatcgttcccttcatggtcattgtcaaggttggcaagccttctgaggtctctcgccccggtaaccgtggtaagcgagactcccagatggttctcatgcgtttcctcaaccgcgtccactacaaccttgccatgagtcccatggagcttgagatgtatcaccagatccgcaacattattggtgtcaacccaaccttctacgaatatctcttccaaattgatgccgatactgtcgtcgctgcggactcagctactcgaatgatttcagccttcatcgatgatactcgcctgattgcttgctgtggtgaaaccgctctcaccaacgccaagggctctttcatcactatgattcaggtctacgagtactggatttcacacaacttgtccaaggccttcgagagtttgttcggctcagtcacttgtttgcctggttgtttctctatgtaccgaattcgcgctgcggagactggtaagcctttgttcgtcagcaaggagatcgttgaagactactccacgattcgtgttgatactctgcacatgaagaacctgctccatcttggtgaggatcgatatctcacaaccttgctcctcaagtaccactccaagtacaagacgaagtacctcttcagcgcacaggcctggactattgcccctgactcttggtctgtcttcctgtctcagcgacgtcgctggatcaactctactgtgcacaatttggctgagcttattcccttggcccagctttgcggtttctgctgtttcagtatgcgttttgtcgtcttcatcgatcttctgagcactatcgtccagcctgtcattgtcatgtatattgtctacctgatttaccaggtcgctaccaacccttcagttgtgcccattacagctttcctgctgctcggtgccatctacggtctgcaggctgtcatcttcatcctccgacgcaagtgggagatggttggttggatgatcatgtacatcgctgccattcctgtcttctctttcggtctgcccctgtactccttctggcacatggatgacttcaactggggtaacactcgtgttattgctggtgaagccggtaagaagatcgctgtttcagatgagggcaagtttgatcccaactcgatccctcgcaagaagtgggaggagtaccaagccgagctctgggagacacagacccagacagcccgtgacgatgtgcgatcagagatctctggttacagttatgccaccaaggctcaaggacccttctctgagtacggtggtggttaccagcccagccgccccggctcaacagctggcttcggccaccagaacatgtctcgcatgtctctggcccattctgagatgcctggcaaccgtgcgagccagtttggtggctcacagttcttctctcccgaggacctggttggcatgcctagtgatgacgccctcctcgctgagattcgtgacatcctcaagacagctgacttgatgactgtcaccaagaagggcatcaagcaagagctggagaggcgattcaatgttcccctagacgcgaagagggcctacatcaactctgcaactgaagccctgctttctggccaattgtag

SEQ ID NO: 323 - DNA, 1992 bp, Fusarium oxysporum
  source 1..1992: mol_type = genomic DNA
atggatctatcacagcgggcgcttccgcgtcacactcatcaccaaccaccaccatctctctcaaatccttcgccctcacatctgccgcctcaacattctacgtctacgtatagtcctggtcccgttgcctcgcatccaactctccctcttcccggaactcacccaccatcctcggctttgacaccaggatcggcctcaacatcccctgcatccatctcccaccggttaccttcagcatcagcttcgacgacatcaaggcatcctactggcgattatctccctgacgcagatgatcaagacgcgtcgacacccgtggatggagaggaacctccaaagaagaagcaaaagcgcaacaagccaactctttcatgccatgaatgtgtagagcgcaagaccaagtgcgacagaggtcgaccccattgtcttgcctgcataaaacgacagactgaatgccgatatgcccatgtcgcaaaccttctcgaggagaccaccaggtcagccgccaatggccgccgtatgacgaaacccccaaagaagaagtctggctctagtggaaagtcccccattccaaatatcgcagataggggtatgtcgaatgatcccagggcaacctcgcgtggcgctgttgccctctctatcggccttctgtccaacgttccttattccttgccttctgcaagtaacgtttttggtatcgggtccgagcacccatttgccaactactggacctgcgaagggggcttgcctgaggttatctcggtgcttccagacaagattcaagccgatatactacttagccgatacttcgaatgtgttgaccccgtgtatcccatgatacatcgccagacattctatgcggactacgaacacttctggcagatgaatcagcaagaaaagaccgatacagatccgtccttcattgcattaatctttgtcatgctggccctgggaactcagtttgtaacatcgactacatccccacaggagcgaaggcagacagcagagttctatgcttcggctagcaaccaagctctccgtatcgcatcatatcttagcagtgcatcgttacggtcaatccaggctatggtattgctagtgtacttccttataaacgacaaccatgcctcagatgggtgggcgtttgcaggtattctgattcggcaagcttatgctatgggtcttcatagagatccaaatattgtgactccaaatgccaccctgtttgagaagcagcagcggcgtaaggtctggcaagcggtacttctccaagatactttcttgaccgtcttactctccctgccaccgtctgcgacacatacagatgtttccgtggaagacctactcgacgatggctcctcgattgcaaatagcgacccaacagatacggcatatattcgaggctcttggactttggccaacttggttcaggagacgatctgctcaccaagatcgttagacctaccaatctgcactacggcaaggcataagtctaagttgattgctgacttccgagctgtttaccgttcgttccctgacgtcttccggtcttgggatcctgatagtatcacggcgctcgcgaaaaccaataagagggtggttcgtcagaccctgttcctgacgagcaactacttccataacttgatgcttgttcatgcttccgagagccctgatgttcctgtcaatgttcgtggtacactggaggcagcgcacgacgccattacagctttcttccttcttttcacccttcttgagatagaagcacgtgtttggtgggtgttcaaccaccgagctttcttggaggcgctgtgtatcggaaatgtcctgaaggaggctgctcgagaaccaggtggtgcagatatgatggcaagagatcctctccttgtcagggcaaaagctgatatcacacgcatgatccaaatcatgcaggttatgggcgaagactctgaggtagcgaggactcgagtgcaggttttgagtgactttctggcatga

SEQ ID NO: 324 - DNA, 1581 bp, Fusarium oxysporum
  source 1..1581: mol_type = genomic DNA
atggctcatcatcaagcgcggacgatggctatggatccgccacatatcaccgaatttgcttctgagcgttacttcgaaaagttaagccagctcaatgcacaccaacatcagcgtcaacctcctccgactcgagataatcttgatgcttccacctcgtcgccttcgagatttattcttcctctacgagaaacgaaaactgccgatgttgaacctctaaggccccttgaccagaagcgtgataaatcaaggtttttcggccttcgctcaaaggtctcgatcctccactctaaatcgagtgtcgcgtctggtcatgcgcctcgagtttctgttgagacgccgcaaaaaagtgctagcttcgatcagcttttcctaggacttcccaacgaattacagattcaaatcatttctgccctcccactaaccgacgtcctgaacctccgacttgcctccaaatcgtggcatactctcgtcactttcaacgaaaatactatcgctcgatatcatctcgaacatcatattcccgtttacgcctcccgcctctaccccatcacagacccgagcgagatcaacttccaacatctatgcgggatatggcatcgattacacgtcgctgccaagctcgcctttctaatgtgtgaatggattacaaaagatatctttcttcgccaaactgaagctcaacgacttgcatttgcaccccagaacgagcgcatgcggcgacgcctaatacctcttctatttaccatattccacttcttcgagacgtaccgaaaattgtacctaaagcgtatggctgagaacggaggaaaaggattgagacgggaaccttatactttgaacccgattgaagccgaaatcatgagtatgtacgacgaccaaaccttattaagggttcacgaagtttttccccttgtaatatcatcgttctgtcggagactccgaccaccgacatatgttggtagagtcgagcgatcacttcgtggctatattcgggagaaaccgtccgacgacatgcatgttgccattttgtgcattggtggactgcgacaagtggaaaggctttgggaaatcaagggatacaacagcaggcgtggtgctgttgacacatggtttaatgctctcacgaaagaggcgccacctactgaacagtcaacgtcgaaaccgaaacgaggtcttttcggacgcaaaaagtccactagtgaagctcgatcgtctggtactgcattgaacaaggtccggagttctggctcaatagatgggaacatggattgggaagccaatcttgtcttcaacacgagtttatctgctggggctcccatgtcacctcttacttcgcaacaggctcaggcattactcagcgaccttcccgtactgcaacaaatatggctcacaacagctgaggccctgatccttcagcgtcgggttgtcgagcgtccacaggatatcaaacgcaaccaacaggtcatgctggatttgatcagtgaagatggacttgtagaagaggacgaatggtggtacggccgcagcattcccgattctgtgcggcctcccgtcggtgtcactgatgacgatgcggattaa

SEQ ID NO: 325 - DNA, 723 bp, Fusarium oxysporum
  source 1..723: mol_type = genomic DNA
atggcgtggacgtgcagcggagacactaactcggctcttattgggaacatgtggaagaatggtctcattgccgaccctcgagtgaaagaggcattcctcaaggttgaccgagctcactacgctccagccatgccatatgaagactcaccccagcccatcggctactcagcaactatatctgcaccgcatatgcacgcctcagccatcgagcatgttctcagctaccttcttccctcatcgacatcgccggccccccgggtcctcgatatcggttctggatctgggtatctaacccacgttatggctgaacttgtcggtgagaagggccttgtagtcggtcttgagcatattcgtcagctgaaagaacttggtgaaaagaacatgtcgaaaagtgaggagggaagaagattgcttgagagtggcaaggtgagatttaggtttggtgatgggaggaaggggtgggttgaggaaccgagagagggagagaagaatgaggggacgggctgggatgttattcatgtcggggcttctgcagtggagattcatccagagctattggagcaattgaaggcacctgggtgcatgttcatccccgtcgacgatgacaagatggggtacaaccagcacgtttggagaattgagaaggatggaaatggggagattacgaagaagaagttgtttggagtccgctacgtgccgttgactgaggcaccgaaggcgtag

SEQ ID NO: 326 - DNA, 2790 bp, Magnaporthe oryzae
  source 1..2790: mol_type = genomic DNA
atggcgtatagaggtgctggagggccgggaggcggccgtgactacgatggtcacaacatgcaagacctaaaccctcacagccagtattccaatgtccaattgcctcctgggcacgagcaagaggacgaggcacacaggtcccttttgacccaaggcacaacgctctacgaccacgaccgactcggcgcccacacgcctccagtgcgtccagtctcggcctacagtctcacagagtcctatgccccgaatgctcccaccaccgttcctggctcggccgtcggcgcatctccctcgccatttcagaatgactatggtgtttcgtcgggctaccagggcgcaatgggcggccacgcagacgacggcttccccattggcggcggagacccccagcaaggccacccctacgataccgaggacagctgggtgcagcgccagaaccccaacgccgctccccagggtggtggtctgaaacgttatgccaccaggaaggtcaagctggtgcagggttcagtcctgagcattgactacaacgttcccagtgccatcaggaacgccgtgcagcccaagtaccgcgagcaggagggcaccaacgaggagtttatcaagatgcgatacaccgcggccacctgtgaccccaacgacttcaccctgaagaacggttacgatttgcgtccccgcatgtataacaggcacacggagcttctgatcgccatcacctactacaacgaggacaaggtactgctgtcccgtaccctgcacggtgttatgcagaacattagggacatcgtgaacctgaagaagtcgactttctggaacaaaggcggcccggcttggcagaagattgttgtctgcttggttttcgacggtatcgagaagaccgacaagaacgttctggacgtcctcgccaccattggtatctaccaagatggcgtcgtcaagaaggacgttcacggccaggagactgttgctcatattttcgagtacaccactcagctgtccgtcaccccgagccagcagctcatccgaccccaggacgacggccccaacactctgccgcctgtccagttcatcttctgtctcaaggccaagaatagcaagaagatcaactctcaccgttggcttttcaacgcctttggacggatcctgaaccccgaggtctgtattctgctggatgccggtaccaagcccagctcgaggtcgcttctcggtctctgggagggtttttacaacgacaaggatcttggaggtgcttgcggtgaaattcatgctatgcttggaaagggcggccggaagctgctcaaccccctcgtagctgtgcagaacttcgagtacaagatctccaacattctcgacaagcctctggagagtgcgttcggatacgttagtgtgttgcccggtgctttctccgcataccgcttccgtgccatcatgggacgacccttggagcaatacttccacggtgaccacaccctgtccaagattctgggcaagaagggtatcgagggcatgaacattttcaagaagaacatgttcttggccgaagatcgtattctttgtttcgagcttgttgccaaggccggccagaaatggcacctgagctacatcaaagctgccaagggagagaccgatgttcctgagggtgctgccgagttcatcagccagcgtcgtcgttggttgaacggttcgtttgccgccaccttgtactcactgatgcacttcggaaggatgtacaagagtggtcataacatcatccgcatgttcttcttccacgtccagctcatctacaacatcctcaacgtcatcttcacctggttctctctggcatcttactggcttaccaccaccgtcatcatggatctcgtcggaaacccccaagttggacagaacgctcgcgaaggctggccttttggtaacaccgtcacgccactcttcaacgccgttctcaagtacatttacctggcctttgtcatcctacagtttattctggccttgggtaatagaccgaagggatccaagtacacctacgtcacgtcattctttgtcttctcggtcatccaggcgtatatcctggttttgtctggatacctcgtcgtccaggccttccagacacctatcggcgagcagatcaagaccgacacggccaaggatttcatggatagtatatttggaaagagcggagccgctggtgttattctactcgccttgatcgccatctacggtatttacttcatcgcctcgttcatgtacctggacccctggcacatgttccactccttcccttactacatgctgctcatgtccacctacatcaacattctcatggtgtacgccttcaacaactggcacgatgtttcttggggtaccaaaggatccgacagtaatgaagctctaccctcggccaatattaccaaaggcgagaaggacgaagtcgtcgtggaggaaatcgacaagcctcaagaggatatcgacagtcagttcgaagcaactgtccgtcgtgccctggcacctttcaacgacgaggagaagcccgagcccaaggatctcgaggactcgtacaagtctttccgtacaatgctggttgttctctggctcttctccaactgtctcttggctgttgcgattactagcgataatttcgacgctttgacaaagaaccaaaacacggccaggactgcctctttcttccagttcttgctgttctcgaccgctttcctctctttgatccgtttcatcggattcctctggttcttgggcaagaccggtataatgtgctgcattgcccgtcgctaa

SEQ ID NO: 327 - DNA, 5619 bp, Magnaporthe oryzae
  source 1..5619: mol_type = genomic DNA
atggcacaacaccttccgcctgtcggcggcaacggtggtgcacacacgcagccttcgctacccgcgctgcccgcccatcttcagtccgacacgcacctcacggggcatcttgccagccgattccacgtcagtctgccaaccgccaaactatcttcccacgccttcatctcgatcaacacatacacttcctcgagcaagggacaagatggaggcaaggccggaagcgctcaaggcgaagctgaggatatggccgacagggctttccttcgtctgggccaccgttccgagaaccaagcaattctgttcctaggtgaatctggctcgggaaagacgaccattcgatcgcacatcctgactgcccttctgaacaagacctccacgcccctttctacaaaggtctcactcgccgcatatgtcttcgacaccctaaccactactaagactgcgaccactccgactgcctccaaggcgggtctcttctacgaactccagtacgacacagcatcaacaacgagcccgctgctcatcggtggaaagctgctggatcatcgtctggagagaagtaggattaccgacgtgccaactggcgagcgaaacttccatatcctgtattacattttggccggcacaagtgccgctgaaaaaacccacctgggctttggagagcccgatgctggaaccggaagcaagcgatggaggtatcttgggcacccgacccaactgaaggtcggcatcaacgacgctcaggggttccagctcttcaagactgccctccgcaagcttgaattccctaggagtgaaattgcagagatatgccaagtcctggctagcattcttcacatcggacagctcgagtttgagagctcggaaaacacgacagttgccggcgatgagagcggtggcttctcgcatgagggtggccagatcacaaccgtggcaaagaacaaggacgtgcttgctatagtggccgcatttttgggtgtcagtgccgctgagcttcaaacaacccttggatacaagaccaagatcattcacaaggaaagggtcactgtgatgcttgaccctgctggtgcacgcgccaatgcaaatgaactagcccggactctttactccctccttgtggcctatgtcatcgagaacattaaccaaaagatctgcgctcccgaggaggccattgttaacacagtgtccatcattgacttcccgggattctcgcagcaaagctctactggctcatccctcgatttgctcctcaacaatgctgctgccgaggctatgtacaacttgaccttgcaaaactttttcgatcgcaaggctgatctcctagagaccgaggaagtcagcgtcccacccaccagctactttgacaactccgacgcagtcaagggactgctcaagaccggcaatggtctcttgagcattcttgacgaccaaaccaggcgtcaccgcaccgacatgcagctcctggaaagtctgcgcaagcgcttcgagggcaagaaccctgccatcggcgtcagtgcagccaccgcaaagctaccgggcagcaacttcttgtccgagaatactgctgcttccttcaccgttcgccacttcgctggtgaggttgaatattcgatcaaggggctcgtcgaggagaatggcgaagtcatctctggtgacctcttgaacctggtcaactctaccaagagtgactttattgctcgtctcttcggtcaagaggccctgcacactgttacccatccgcaggagagaaccacggtgatgcaagcttcagtcagttccaagcctatgcgtgccccaagtgtcatgtcgcgcaagatccgaccgggaacggctcgtactactcgccaacgcaaggagtcaatcagtgggcgacaggacaccctagacgatattgccagcgaagccggagattcccggcgccccgtcaacaagccatccgaggaaggcgcttctggtcagttcttacactcgcttgacaacgtgaccaagtctttccatgcacagaacacaaacgcctattttgtcttctgcttgaagccgaatgacaggcgcattgcgaaccagttcgacagcaagtgtgttcgcacacagatgcaaacatttggcattgccgagattagccaacgtatcagatctgcagacttcagtgtgttcttgccctttggagaattcctgggtcttgctgatgttgacactctcctcgtcggaagtgaacgggagaaggtcgaggctgttgttgatgagaagcgctggccgaccaatgagatccaaattggttccacaggtgttttcatcagtgaacgatgctggatggagatcgctcagctcagtgatatggtaaccggccgattcggcgtgcccgaatcggagggcggcacgccactcgccaacatgccctatggcgcttccaaggagcgcctcatagcggctgggaattcgccatacaacaatgacaaggccaagtcgggctactttggcagcaatgacatcgatggcaggtcagacgctggagtttcggcttttggcggaggcgacatgttcaagaatctggatacccgtgagcagatggctgagcgtggtaatgaaaagtccatggttgaggtggaggagttcaaagacagcccgagccgcaagcgctgggttttcattacctggatgctcacatttttcgttcccgagttcctgatacagcatctcggtaaaatgccccgcaaggatgtgcgtatggcatggagagagaagttggccatcaacttcatcatctggttcagttgcttggccgccgctttcatcctggtcgtgttccctatgcttgtttgccctacgcaatatgtgtttaccggcgaagagctctcggcctacaacggaaaagatggcaaggcttcgtatgcagccatccgtggtcaggtctttgatatcggatcgttcatccctaggcaccccctgccctatctgccatcaaagctcttcacccagtacgctggcactgatatcaccggtcttttccctgttcaggtgtctgctctgtgccaaggcacgactggctctgtcaaccctgccgtgctactggattacaaagacaccaacatcaccgactcgcccaacgtttttaacagccaggatctgaattcgcgctatcacgactttcgttacttcaccaacgatacaagacccgactggttctctcagatgatgattacgttccggggcacgtataagaagggcaacatcggctacccggctcaagttgtccagaagatggcccaacaaaggaacgccatcgcaatactcaatggtcgggtgtacgatttcaccaagtacatcgctggaggccgcgatttcagggtcaagtataacgaaacgcgtcctaccgaccagagtctactcgactttatggacccgtcagtcgtgaggcttttctcggaccgtagcggagaggacgtcacgccgctctgggatgcacttaggctggacccgactttacgaaagtcgatgcaactctgtctggataacctgttttaccttggcgatgtcgatacgcgtaactcggtgcgttgcaactttgccaaatacttcatcctggctgttacgatcatcctttgctccatcatcgccttcaagttcttggctgcgcttcagttcggtaccaagaacatgcccgagaacctggacaagttcatcatgtgccagattcctgcctacaccgaagacgaagagtcgctccgtcgcgccattgactctgcagcccgtatgcgctacgatgacaagcgcaaactcttgatcgtcgtttgtgacggtatgattattggtcagggtaacgacaggcccacgccgcgcattgtgctcgatattttgggtgtctcggagacggtcgatccagagcctctcagcttcgaatctctgggtgagggtctcaagcagcacaacatgggcaaggtttactcgggcttgtacgaggttcaaggtcacatcgtccccttcttggtggtcgtcaaggtcggcaagccatccgaggtgtcgcgccccggtaaccgtggcaagcgtgattctcaaatggttatcatgcgcttcctgaaccgtgtccactacaacttggccatgagcccgttggagctcgagatgtaccatcagatccgcaacattattggtgtgaacccgacattctacgaatacatgcttcagatcgatgccgacacggttgttgctgccgattcagcgactcgtttcgtctcagctttcctggatgacacccgcctgattgcatgctgtggagagacgtcgatcgccaacgccaaatcttcattcatcactatgattcaagtttacgagtactatatttcgcacaacttgtccaaggccttcgaatctctgttcggctccgttacttgtttgccaggttgtttctccatgtaccgtatccgcgccgccgagacgggtaagccgctcttcgtctcccgcgaggttgtcgatgcatacgccactatccgcgtcgacacgcttcacatgaagaacctgcttcaccttggtgaggatcgttacctgaccacgcttctgctcaaataccacaacaagtacaagaccaagtacatttaccgagcacatgcttggaccattgcccccgactcatggaaggtcttcctctcacaacgtcgtcgctggatcaactcgacggtgcacaacttgatcgagcttattcccatgggccaactttgcggtttctgctgtttctcgatgcgtttcatcgttttcatcgatttgctctctaccatcattcagcccgtcaccattgcctacattgtttacctcatcgtgcgcatggtcctcactcctgatctggtccccgttctggctttcgtgctgctcgcggcagtttacggccttcaagctatcatcttcatcctccgccgcaagtgggagatgattgcatggatgattctatacattatcgccatgccaattttctcgtttggtctgcccctgtatgccttctggcacatggacgatttcacatggggtaatactcgtgtcgttaccggagagaagggtaagaaggtcgttgtcactgacgagggcaagttcgatccctcatccatccctcgcaagaagtgggaggagtaccagagcgagctgtgggatgcccagacctccaaggatgacaccaggtctgaggcttccggcttctcgtacgccaccaaggcccccgtcgcggtctccgagtatggtttccccgtcaacccctatggcgcataccctcccagccgacctgggagcaccacgggcataccacacatgccacacatgccatactcggccagccgcatgtcattggcccattcggagatgctcatggcgggcaacagacaaagccagttcggtggatcacagttcaacctccctcaatctggcagcgaaatggaactttcaaacctggctggcttgccatcagatgatgccttgcttgccgagattcgggagatcctgagaacggcagatttgatgacggtcaccaagaagggtgtcaagcaagagctcgagcgcaggttcggtgtaaacctcgacagcaggagggcgtacatcaacagcgccaccgaagcactcttgtctggccagctgtag

SEQ ID NO: 328 - DNA, 2487 bp, Magnaporthe oryzae
  source 1..2487: mol_type = genomic DNA
atgggcaatccctttgaaggatggccggtacacgatatcgtttacacggtaatcgtcggcctggtcatgttggctgccgtcctggagtggttcctctgggtggcggccttcatgtattgtcttgttaaggtgtttataaaggcggagcattggacgattcgggctctcgcggttgtggttgccatccttttcgtcggattcagagcggtcttcttgccaatcatggtagtgacactgcccttaccaagcgctattgtgaaactctggccggaagacatggttgtgggactacagtggtttgccttctgggcgttcgccggtctcctgacgatcccatggcttttctgtgtctaccatttcgtcaccaaccagctaggccgagagaagcgtgtcaagcaggtgctggatgaggtctcggccccaaaggttgtcatcgtcatgccttgctacaaggaagacccagaggttttactcgtggccatgaactcaatcgtcgactgcgactacccgccatcttgtatccacgtgttcctgtcctttgacggagaccaagtggacgagctttatctcaacacaatcgaaacggtcggcgtgccgctcaccttggactcgtaccctaagagcatcgacgtcacttacaaggctgcccgtatcaccatctcccgcttcccccacggcggtaagcgtcactgccaaaaggcaacgttcaagctcatcgacaaggtctacaaggaatacctcgagcgcaacgacaatctcttcattctgttcatcgacagtgactgcattctggaccgtgtgtgcctccagaacttcatctacgacatggagctgagccctggaaactcgagggacatgttggccatgactggagtcattacttccacgaccaaaaagcacagtcttattaccgtccttcaagacttggaatacatccacggtcagcttttcgagcgtacggtcgagtctggatgtggtgctgtcacctgtctgcccggagctctcaccatgttgcgtttctctgcgttcaggaggatggccaagtactactttgctgacaaggccgagcagtgtgaggatctcttcgattttgccaagtgccatttaggcgaggaccgctggttgacgcacttgttcatgatcggtgccaagaagcgataccagatccaaatgtgtacctcagccttctgcaagaccgaagccgtgcagaccatgcagtctctggtcaagcagcgccgtcgttggttcttggggtttatcaccaacgaagtttgcatgttgactgactggcgtctatggacgcgttacccgctcttggtgttgatccgcttcatgcagaacaccattcgtaccaccgctcttctcttcttcatcatggttttggctatccttaccacctcgaagcgggtcagtgacctgcctgtcggtttcatcgccatctcgctcggtctcaattggctcatgatgatctactttggcgccaagctccgccgcttcaagatctggctgtaccccctgatgttcgtactcaatcccttcttcaactggtggtacatggtctacggtattttcacggccggtcagcgcacctggggtggacctcgtgccgacgccgccgccgccgacggagacaccaccgcccaacaggccatcgaggcggccgagaaggccggcgatgacctcaatatcgtgcccgagaccttcatcccggcggcgcagatcaagcgcaaggagagcggcaggcggcgcatcgtggccggtggcaacatccagccctcggccaagatcgacggcatgtttgccatccccgagcgtggcgccaacggttggtaccagcacgacaacatctcgctattcacggttgcccacggccacactggccgcgttcctctgcaccctcgtgactcattcgacagtttcttgtctgcgcagacggccctgaactcggtctacatcccgcgccgtgtcgagagtataatgggtgacgaggatcggcgcaagtacgagctcgcccaggccagccagtttaaccagttcctctccaaccagcgccgctcgaccaacggcgagccgccgcagggccaggtgtacgagtatagtgacgtcgacctgcaaaaggccgggtacactgacaacccgctgccgcccacgcctggagagactgcctctgctgttcctgccgccctcaatctgcaccacaaggttggcagcaccgacagcctcgttagtcttgggtcttcagcgtccaacagcaaccaacgggaccgcggaaggcagcgcaccctgatgccaccaacctcctcacaggcccggaccggtaggagtccactcggccgggcgagcttcttgcgcacgtcgacgattgaggacattgagctggagattggcacaagccatggaagcagcgcaaacagacctgcactgagcaggcaagcgtcgaacaacgaccccaacaacagcaacagcggcggccatcagcaacggtag

SEQ ID NO: 329 - DNA, 1158 bp, Phytophthora infestans
  source 1..1158: mol_type = genomic DNA
atggctccgactgtccaaacgtgtgatcctgtactggtgtgcgaccctgtcctcctgtgtgaccgaagtgactccgtgctggcgagcgaccctgttccgccacagaatctctcgttcgtgctcgaaaaggggggagcagtcaagtttgaagatcgtcccgtgcctgaaattaaggacccacatgacgtgatcttgaacgtacgctacacgggaatctgtggtagtgatgtgcactactgcacgcacggctgtatcggcaagtacgtggtggataagcccatggtgctaggccacgagtctgctggcgtcgtccatgccgtgggatccgccgtcaagtctctcaaggtaggtgacgaagtggccatggagccgggtgtgccgtgccgccgttgcgtccgctgtctcgagggaaactacaacttgtgtccggatatggcgttcgcagccacgccgccgtacgacggcacactggccaagttctaccgcatgccggaggacttctgctacaagctgccgtccaccgtcagtatgcaagagggagcgatgctcgaacccacagccgtggccgttcacttctgccgtctggccaaggtgtccccgggtcagaaagtcgtcgtgtttggtgtcggtcccgtgggtctgttgacctgcaaagtggctcgttacgtgttcggagccacaacagtcgtcggcgtggacgtcaatgagaaacgtcttgcggtcgccaaggaacacggcgcgacgcacgtgtatcaggggaagtccggcgtgacaccacaggagtcggccgagcagatcattgccgagtgcggactgggcgacggggccgacgtcgtgattgacgcgagtggagcggagccctgcattcagacggcaatctacgtcgcacgcagcggtggcacgttcacgcagggaggtatgggcaagacagacatcacgttccccattggcatcatgtgcggcaaggagctccgcgtgaccggcagcttccggtactctgcaggcgactaccaactggcgctcgatatggttgcaagtgggcagctgaacgtcaagggtctcatctcgaagattgtgccgttcgaggaagccaaggaggctttcgacaatgtccagcgcggtaacggcatcaagtggctcattgaaggacccaagtga

SEQ ID NO: 330 - DNA, 3907 bp, Fusarium graminearum
  source 1..3907: mol_type = genomic DNA
gatcttcgcttggccttgctccactaagaaggagtttcactagcggcccgcgatagctagcctgatcctagtctttacctcctcaacagtaacaccttctttcaccaccacaagctgagtcttgctcctttgttggaaacagtgaccggattcacacctgacctctggcaatcaataatttttgacccaagtcaggaacttatggctctgtgacagcaaacaagcgctgctgttgctgatttgctttggctgccattcactgacattgattgactggtggcaactaccaacaaacaccttctctcacataaatatacctactacctatctaattcctctccaatttcttccccgtcaactctctttctgcgcatcagcacacggatatcaactaagaatatgagcgacatttatcaacactctttcttgaagttttaaaacacaatatctttacttctttcgctatcaaacacatccttacatacattgacatcctctttggcccattctttgagtacccagacattatctcatcatggcggacagaggtgatcgaggcggccgtggaggccgtggccgtggcggacgcggcggcggctatcaagatggtcgaggaggcggacgaggtggcggagatgggagaggacgaggtgatggtggtttccgtggcggcagaggacgaggtgagggaggacgtggtgacttccgaggcggcttcagtggtcctagaggcggccgtggaggttctgatcgcgggagaggaggatacaggggaggccgaggtggagggcaattctcaaacgagccgtctttcttcaagatcgaatccggtgttcctcagcccgatgctgctattaccaagctcgaggatgaggtggtaaagaatcaaaataattctgttgcccagcttacatcgaaaatgtccaagttgggagtagaagaaaaggagcatttgagcaaattccctccacgacctgcatttggaaacaaaggccgtccagtcactttatgggcaaactattaccagatcgacaccaatattcccatgcttttcaaatacacaatttctgtcaaagagatcgtagctgaatcagaagaaaagaccgacaagcccactgtcgcccagcctaaggggaaagggaaaggaaaaggcaagcccggaaagcctaagaagtccggttctgtcgaagtcaagggacgtaaacttttcttggtcatcaaagagactctaaacgagctcaccaagaaggacaagagcctgcttcttgcgaccgagttcaagtctcagcttatctccttgcgcaagcttgaccttggacttgacaactcatttcgagtaaacctcccgtcatcagcaaaccccgacaagaccgaagtctttgaagtgaccttaaatggccctgaagtagcccgagttgacgagatgctcaagtacgtcaaatcgaataccagtgcttcacatgacgccccaggcaaacttgccgacgacgacgacgatgcagcaaaagccctggcattcccaaaattccctgatgttgttgatgccctgaatgtcatctttgggtttggcccgaggtcgaacgaagacattagtgctgtcggaaactcccgattcttctctttcaagaacggtggtatctgcagggatatgagcatgcgtgggagacccttacaagctgttcgtgggacattccagtctgtccgcctaggtaccggccgacttcttttaaacacaaacatcactgttggcattttcaagatatccggtaactgtgccaagctcttccaggatctcaatgtctttgaagcacagaagtcggaatggcggaaagtgaataacgcgaagttgatgaacaaatttctcccaaaaacccgcgtactggcaacgatgaagtttgccaatgacaagaaagtccaacgacggaaagcaatttacagtctggcctatgcacctgagattgaacgagcctgtcgtggcaacgatcatcctccccggttcacgaagggttatgaataccctggaccaggcaacgtgagcttctacatggtgtctgattctaaagggaccggtgaatatatcactgtcagagaattctacaagcggaaatacaacgacactacgctcaaagactaccctcttcttaatctcggcactgccgcaaacccgaactttaccccagcggagtatgtcgagatcctaccgggacagtcagtcaaggcgaagttgaatagccaagaatcgaccgcgatggtcgattttgcctgtcggtcaccttacgccaatgctttatccattacgaaagatgcgcgggaaactctaggtcttgacgacgagaaattggtgtacaagcccggcaaaagcatacaaaaatggacctatgtcaatgtcaaaccaggaggcaggtctgggccggttccaaagcgcactgtgatggaatttgctcaggtcatgagacaaatgaatattggaatcagcagcaaccctgtagacccttgcacagaggtcatcacccaagaagattacgctcaaggacgttcagatgctttcttcaaatgggcgaagcagaatcgcatagagtttatacttgtgattcttggtacatcagagtccgaaacatacggcaggatcaagacattgggcgactgcacctatggtattcacacctgctgcgcccaggccgaaaagtttggattcaacagaaaccctctgccatatttcgccaactgtgctctcaaatggaacctgaaggcaggtggtgtaaaccacaagctccacaacgagttcggtctcattaaagagggcaaaacgatgttggtaggatatgacgtcacccacccaaccaacatgccttcaggccagggtgatgatgctcccagtttggtcggattggtggccaccattgaccgagatatgggacaatggccagcctactcttgggaacagtcgtccaaacaggagatgttggacgagactttgactgaagcattcaagtcacgacttgcactttggcaaatgcacaaccgacagcagctgcctgagaacatcgttatattccgtgatggcgtgtcggagggccagtttgcccaagttttacaaagagagctaccacgcattcgcattgcctgcaatgccaagtaccccaagaacaagccaccaagaatttctctgatcgtttccgtcaagcgacatcagactcgcttttatcctacttcttccgagagcatgacgtccaagaacaatatcgaaaacggtaccatcgtcgatcgtggtgtcacgcaggctcgatactgggacttctttcttactgcacactccagcatcaaaggcacggctcgccctgcgcactacactgtgttgctggacgaggtcttccgagcgaagtacggagccgaggcagccaatgaattggagagatatgcccacgagctctgctacttgtttggccgagccaccaaggctgtgagcatttgccccccggcatactatgcagacgttgtgtgcactcgagcgagatgttacagacctgagttcttcgaaatcagtgacgttgaaagtgtctcaacagctgggccgggcttaggtgccagtgacccaaagcaggtccatgcggacctcgccaactcgatgtactatatctaagtgtgccgtgtgtgggagatgagttcgctcttttgggctacaaacagagacgagaaatgaagcttttttttttggggggggggttttttttgggaaattggtaggtttctgttaaaggtatgaggtagcgggatatctttgattgtctttcgtttggtttatatcgttttgtcctcatctttgacttaggacagaatagttaggatagcggaaacagcttgcagtcttgtatttggtacttgaagttgcaaggttatacatagcaat

SEQ ID NO: 331 - DNA, 2955 bp, Fusarium graminearum
  source 1..2955: mol_type = genomic DNA
atgtctgatagagggcgctcaccctctccagggggtccctcagggcctgggaggcgaccttcacagtccccagcccgatcggcaactggctctggtagtggacctgctggcggctatgcaaagcccctgggctacgatcctgcgaagcctccaaagcaggaggaccagggaaacacacgaatggaactacctccagatgcgtacatttccgagaccaaaaaggatatgtttactttaagaaacaatcgtttcaacactgagggaaagcctgagcacatcgaggtcaaccagtaccgaatgaccaagttcgacttcaacaagaagatctaccagtacgatgttgtactttcgcctagccctgacaagatcggtccggtcatgaagaagatttgggctcatcctgttaccgtgaagaccatgaagccctacaagcttgagatgtggcttttcgacggtaagaaactggcatggagccccgcgcttgtcgaccgtggtgaacttcggttcagtgtcgatctagacgaaggccaacgtcctcctggagccaagcctcgggatggtggcaagttcctagtcactattcgaaagaccaccgagatccaagttgctgctctgcagggctatctgtctcacaagatgtccttcaataacagtgttcaagaggcactgaacttcattgatcaccttgttcgacagttcccctccaggaacctacttgctatcaagcgaaacttttaccaaactggtcgacctggagctcctcttcaagacggagccatcgttgaggtccacaagggaacctacgcttcaatccgaatgagtgacaacttgaagcaaggtggtgtcggacttggctacaacattgatgtcgccaacacctgtttctggattggcaaccagccattggacaggatggcctgcaactttcttgctaccattgacccaagcaagttccgaggacacactcctgcgactctcaatgagatcctgaagccagtcaggaataggagtggcgggtgggagtcatctgatggcttcaagcaacttcgcaagttgcgacgcctcaaattcaagatcaagcacaagggccgcccaaacgaggacaagctgtacacgatcatggactttgcattcgatgccaagtttggtgaagctggtcacacctcccgcacccacacctttgagaaggatggaaaggacatcagcgtctatgactactacaagaaaatgtacaatgtcaccctgcgactttcccaccttcctcttatcaacgctggaaagggtggcttcattcccatggagcttgccttcgttgagagcatgcaacgatacccattcaagctcaaccccgaccagacagctgcgatgatcaagatcgcggtcacccgccctgccgtacgcaaagccgacatccaaaagggagctgccgctcttcagatcggtcaagatccttatctgagggagtatggtgtcaatttcgaagcccagtttgcgaagaccgaggctcgtatcttgcctccccctactgtcaggtttggccagggcacagcggaacccaagttcgctggtcgctgggacttgcgaggaaagaagttcttcaagcagaacaccgcccccctccagaactggggctttgttgcctgtgaagcacctgtcccacaggctgttctttcagcattcgccacaacattcaagaccactttccttggtcatggcggcaaggtgactggagaccccatgcttctcaatgcacctagcaacctgcgttttgaacccggaaagctggttgagtgggctcatgaggagatcactcgccgaaaaggctacacacaactcttgttcattgtcgtgtccaagaagaacagtggtacctacgagcgcctcaagaagtctgctgattgcagatacggcattctcagccaggttgtccttggtagccatgtgcagaagaacaatggccaataccactccaacgtttgcatgaaggtgaacgccaagcttggtggtgccactgcctgcacgcctcctctgtggaagactcccacattcttccccgacagccgcccaaccatcattgtaggttgcgatgtctcccacgctgctcccggtggtgcgactgcttcagttgcttccatgaccatgtctgtggaccccaatgccactcgatacgccgcagtcgctcagacaaatggatatcgcgtcgagatgcttacccccagcaacattcgactcatgtttgcagaacttcttcctcagtggcgacacaaccacccaggaaagatacctgctcatctgatctacatgcgagatggagttagtgaaggccagttcgctcatgtattggagcaggaggtatccgaaatcaagaaattctttggaggcagcctcccccccgacaagattcccaagatgacagtcatcatcgctacgaagcgtcaccatgtacgcttctttccacagaggggtgacaagaacggaaatcccttgcccggtactctggttgagaaggaagttacccaccctttcatgtttgacttctacctcaactcccatgttgctatccagggaactgcacgccccgtgcactactcagtgattctggatgagatggctatgccagtgaatgatctgcagaagatgatttaccagcagtgctattcctacgcccgctcaaccacccccgtctcccttcacccggcggtctactacgcgcatctcgctagcaaccgagctcgtgcacacgagaacgtcgcaaccagtgatggatttagaaccggtgccaaggggcatgagattattcgggagaagcaagcccatggcatcacctcggacgctcctaacaggaccgctgatgcaccccccctgatccgtctaggaggcccttgtggacagactcctgctgatggcgagaagcgccaacgagattttttccgcagtaccatgtggtacatctaa

SEQ ID NO: 332 - DNA, 1494 bp, Fusarium graminearum
  source 1..1494: mol_type = genomic DNA
atgtcggacctacaaagccgcttggagaagctgcaggagcttttgggcaacggcgtgaagcttgctgaaacgccacacgaagacaacacaacagatggttccgctgcaaatggccttgggaatagcttcggaatggtgatggatgatgagtacatccggaacgaggagcggcttgcagctagagagcaggcctcccaggaacagctgcgagccgatgctgatgccgccagacaaggcctgctcaaaggtaataaggaaaaagccttcgacaacgctgcttttcgcatcggccagcccgttcacaaggactttgctttctgtccgtttaaggtcgtcgtgtcgtatcccgaacgtttcatcggcaaggccaacaagcctcgtgtgaagccatttttcactgaaattctcaagggccgaacttgggactttttctatcttcatgacccgattgagccagccagagacccgtacctcttgattccatccgcccagttcgaggttttcctcgaagaaatcaatctcaaactgaacactttcctcagaatccctgtttgtcccatgaacaaggacaagttctacatgaagtttggtgaaggcggcacccctcgtcctcgttacttgagacgatctttggatgcgacctctcttgacatccggccgtggcctgcagtcgaccccgaagacgtcagatccttcgaagctgcctcggcaccgcaaaagctcacctggaggtccaagatgcgaatcgttaagtccggcttcgcaccaaagaggacggcagatccagacaaggctgcgaagaagaagcgtcacagggaccaaatgctgcgcaacacattgggctacttgggtcttgcgggagatccggatggccacgacatcgttttcatctgtgtcgacgttgaagccattgaacgtaagccaaaccctatctctgaagttgggatttctatcctggacacacgggacatcaaaggcgttcaccctaaggatgctggtcgtggttggtggcctatgatcaagactcatcatcttcgagtgcatgagtatgccagtttacgaaactaccaatttgtcaaggggtgccctgactcttttgactttgggaatagcgtattcccttacaaggacgagcttcaagaagtcatcatgagcatctttaacccctatatttcctctcaacgggaacttgtcgtcgttgggcatgatgtgcgacaagacatcacctacttcaacgatataggtatagatctccgagcccttgcaggactgagagagcctatcgacacccagggcatgcaccaagcttggtgcagctcaaccaatggacgaggcctcgtcaccgtactcaacgatctgaacattccaaacaagaatctgcacaacgccggaaatgatgcccactacacgctctgcgccatgctaggaattgcggtggtagaggtcaatgggaacgagcaacagagcaacgaaatgcttaacaaggttgactga

SEQ ID NO: 333 - DNA, 4488 bp, Fusarium graminearum
  source 1..4488: mol_type = genomic DNA
atggacaccgactcgaccgacagcgaagatgatcgcgttcagtatcgcctgaccgtgaggccttcgaagcatcgaaagaatacagagaagaagcgcctgaacaagcaggttttgaaacaatacatgatagaacacgacagagaagcctatgccaaagattctgagaaaaagaagcgcggccccttcgctgaagcttccaccgacattacaccgcgagaatatcagatagaactcttcgaagccgccaaggagaagaatctcattgtggttttacctacaggcacaggttctggtaaaacactcatctccatcttattgctaaaatactacattcgaatcgaagtggaatctcgcgctcttggaaatccgaggaaggtggcctttttcttggtggaaaaagtagccctctgtgagcagcaataccgatttcttaaggaccagattttcggccacaacattgtcatgttcacaggcgataaccgcggcgtgaccaaggacaagaagtactgggatgatcagttttcctcaaacaaggttgtggtctgcactgctcacattttgctcgactgtctgaacaacggcttcattacaatggaccagatcaacctcctcatcttcgacgaagcccatcatgcaaagaagaagcatgattacgcgcaaattgtccgacgatattattattctaccgaaaagaacaagagacctcgcattctaggaatgaccgcttcccctgtggattccaaggctggagatgttgcagaactggcacttgaacttgagaaaacccttgacagcgagatcgcaacactctccgacaagatgatgcgacaggcgactgatttccaagttcatgttgaagagacagtcaaatacaacacacttggactaccagacgagaccaagacacagctttgggactcgatctctaagctagtatcgcgaaacaaggaattcaaggcgtctctcgacttcacaaaagaggcctccacaatcctaggaccctggtgtgcggaccgatactggcaagtcttgatcgacgatacagagatcaagcgactcgccgacaggactcgcatggcttttttcgggggtggagagaagttgttggcaagaggagaccaagcagaagaggctgtcagggaggttcaaaaggtcgtcgcagcccacgagtttagggcgatcagtcctcaatcgcaggaattgtcagctaaagtgaaatgtctacatgaaatcctggttcatgccttcacagtcgataacacaaagcgctgcatcgtttttgttgatcagagacacacagcttgcctcctttcggacctttacgaccaagtttcaatggcaattcccggtatgaatgcttcgtatatgattggtcaacaatctagcagcagcacccttggcaatatgtctctgcgaaagcaatgttcaacgctcaagaactttagggacggcgtgataaactgtctctttgcaacatcagtggcagaggagggaattgacattccgagttgtgatcttgttatccgatttgatctctatacttctgttattcagtatgttcaatccaaagggcgtgcgagacacgaatcttcacggtatatcaccatgctggaagacggcaacatgagacagattcgcagtctgaaacaagcagcgagagatgcaacagcccttcgagagttctgtctaagaatacctgccgatcgaaaacttcaagacgatgtatttgatgaggagacggaaagtcagatcaagcaaatacgttttaacgtgtacaaaatagaatcaacgggcgcacaacttacattcccctcaagcctcgagatactagctcgattcgttgcatccttgggtacagcagagagcagccatagcaaggctgaatatcacgtctacaaggtgggaacatatttcacagccgccgtcaatctaccgtccagttcccccatcgtctcccaaacaggctatccacaacgaagcaagcttctcgcaaaatgctcagcggcttttgaggtttgcaagaagctcatcaatggcaaacacattgatgatcatcttcagcctactttcaagaaacatttccacaaaatgcgcaatgctcgtgtgggaataagccctaacaagaagggtgagcatgacatgcgcctgaggcccaacgtttggagtatccgtggagaatggacacacttcttcccaacaagaattactcttgacagggattgtggagagaaaaacaggtcgttgattcttctttcgcgaagtccacttccaggactaccttcaatccctctattcttcggcaatggacgctcagccatcgttgaagtgacatgttctcaagaacctttacccatcacgaccgaggaagctgggggtttgactgctttcacactcaaaatctttgccgacgttttcagtaaagagtttgaggccacttgcgaccagtttccttaccttcttgcccccttggcaaaagacaccaatctaaacgaaatatcgcgaatcgactgggatactgtcaaccttgtcagagaccatgacagtctcgaatgggagaatgcgcccgacgatttctttttcgacaagcttgttgtagatccatatgatggagggcgcaagcttataatcaaaggcattgacaaatccaagaagccttctgatcctacaccggagggagtgcctgagtcgagaagtcgtgcttataggtctgcggaacaaaacattaagcagtacagcaacagtctgttttccaagtctcgactaacggcccagtggcgagacgatcaaccggttgtcaaagctgagcttctctcattgcgacgcaatctgttggacgagtttcaagtaaacgaggaaatcaacaaggattgcttcgtcattttagaacccctcaacgtgtcacctctgccaattgacgtcgtttccatggcactcaagttcccggcaatcatccacagaatcgattctgctctgatcgctcttgatgcatgcgaactattcgacctctctattccgccagcgctggcactcgaggcaatgaccaaagacagcgacaacactgaggatcatggcaagcaacaaatcaatttccaagctggcatgggttccaactatgaaaggttggaatttcttggagactcgtttctcaaaatggccaccacaatctccatttttgtactcaaacccaagagcaacgaatgtttgtaccatgtagagcgcatgctgctcatctgcaacaacaatctgttcaacacggccgtagattgcaagctcccagagtacatacgatccttggcattcgacaggcgaacttggtaccctgatcttacactcagaaaaggcaaagctttcaaggcaacagcgcgacagcgcttagccgacaaaagtattgcggatgtctgtgaagctctcattggtgctgcatacctctcaagcaaggatgacaatttgaacatggccgtcaaagctgtgtcacagatgtgcaaagcaaagtaccataccatgatggcttacgatgagtactacgcatctttcaaggttccagattggcagaaagccagtccaaacgccaaccagcgtagacttgtgcagaaagtggcagacgctaccgggtaccacttcaagtctgcgccgctgctccagagtgcattcacacacccttcttacgcgtattcagggaacgttccaaactatcaacgcctcgagtttctaggcgatgccctcatcgacatgaccatcgtcgaatatctctatcgcaactttcccctcgcagaccctcagtggttgacggagcacaagatggcaatggcctcgaaccaatttctcggttgtctgtgtgttaagctcaatctgcaccaccatcttctgttcaacacgtcgcagttcatcagcaaaattcgtgactatgtggccgaacttgagttggctgaagagactgcgcgccaagaggcagaagaagacgggactccaatgcgcatggacttttggctcaatgcgacaacgcctccaaaagcgtacgcagattcaatcgaggctcttatgggggccatgtttgtggattctgaattcgactattctgttgttgaggatttctttaccaagttcatcttcccgtactttaaagacatgtctctgtacgatacctttgcaaacaagcatccttacacatttctcaccaagaagatgcaacaggagatcgggtgcatgaaattctgtatgatttcagacacccgcgttcctgatgcagagcgtggcatggaagttatgaaagagtacgacatatattcagcctttcaagtgcacgaaagagtcatcacatgtcacgtatcaaagagtggaaggtacggtaagattgctgctgcaaagggggcactcgagttgttggagccgtatggcggtgatgtggtcgcgatgaagaagctgttgggctgcgactgcgactctgtaacagcagccatggcggagatggaccatggaacagctgtctaa

SEQ ID NO: 334 - DNA, 4356 bp, Fusarium graminearum
  source 1..4356: mol_type = genomic DNA
atgtcctcaagcgataaggtcatggcggacgcctcttccataccagactccgaggtcaaaacaatagcgtcgtcctcggtcgtcgagatctctgctacaggcgagaaggagataacgactcatatacctgtcgcagatacaccaatgtgctcagatgaccaggccaatgtgcaagagcaagacgaagaagttaagcctcagaaagtgacgcccaatccagaggtggtaaatccccgcggttaccagcgagagatgctggaacaaagcatcaaaaggaatgtcatcgttgcaatggacacgggaagtggtaaaactcaagtggccgtgatgcgcatccaacatgaactcgatacatgtgcaccagacaagattatctggttcttaggcaagacagtatcgctatgtgaacagcaatacagcgttgtccaaaggcaaatgccgtcggtatcgatgaaactgctaacggggcaattgaacatcgatgcatggtccgaggacgtctggccccgtatccttaatgggactcgtatcattgtctcgacctttgatatcctgcgagatgctttggaccatgcatttgtcaagatgaacatgctgtcccttatcgtcttcgatgaagttcataattgtgtaaagaatagctctggtcgaaaggttatggtgaatttctatcacgaacacaagaacgccggcatgcccgtgcctgctatcctgggtttaacagccagcccgatacagtcgaagtcaatccacgacgaaatccttgagctcgaggtcaccatggatgctgtatgcatcactccaacaattaaccggaaagaactcctccagcacgtcaacaagcccaatctttcccgagtattgtatgatgtggaagagcatccgactcgaacccccctaatgcagactctgcagtctgagtactcggcgatggacatcacccaggacccaagtattataaaggccaagcaacttatcgctaagggcgagaagactggacctgaaatactaagtatgttgatgaaacacaggaccttctctcagaagcagttaaagtccttatggaacaaaagcaaagacattcttgatgaactcgggccttgggctgctgacaagtacatctccgagttggtcagtctgtttctcaagagaatcgactcgccaatgacgtttaacgagtcctggagcaatgaggataggacctacctcgcaggtcatttgagacagatcgctgccagtccccatcagcccaaactaccagacagacacaacttggccgacaagacgaataaactaatccaggaactacttgcagcggatgaagatgtggtcggcattatattcgtcagatcaagggctgctgccaacgtcctttgtgctcttttgagggagcaccccgagattcgacagcgatatcgagtcggctctgtagtaggatccgcagccaccaagattcgaaagcaaaacatctacgagtatctgcccggcgcgactgccgatacattacgcgatttcaaaacaggcgccatcaaccttttggtctcgactagtgttcttgaagagggtattgatgtcgcagtgtgcaacctcgtcatatgtttcgatgagacaacgacactcaagtcccatatccaacgccgcggacgagctcgcaaacaaaaatcaaagatgatagtacttgctagatcttcatccgacgctcgggaatgggattccctagaaagagacatgaagagtcgttatgagcaggaaaggggagagttggacgctttagagatagaggctcgcactgaagcgacgtcctctttttcttatactgtgaaaaactcaggggctagattggacctcgagaattctcgccagcatctggaacatttttgtaacaaggttttccagcgagattacgttgatccgagacccgtctacattttccacaagaccgaactgggatcagcaccgccgactttcagcgcaacggtgactcttccctcgggtctgcctaagcacctccgaaggtgccaaggtggaggtggatggagatcagaaaagaatgcgatgaaggaagcggcttttcgtgcattcgtcatgctgcaccaagaaggtttggttagcgaccaccttcttcccctaaatgcagattcgaaagaagcagaagaagaggtgcagctaactgcgcccgagcttctatttgacccatggaaagacattgcacagcggtgggagaccacggctgagaaatggctctatgcttacgagttcgccgatcacgagtatgttactcctcttcatttcgagattgccttgcctgtgtgtcttccacgaccccgcgacatcacctttcatcctgaagagggacttaaatggcatgtcaaatgcacctcaatcaagaggatctccaatgatgaatgcttgggcttgccagatcatacgtcaaccctattggcgatgcattatggccaccgctggaacgtggaagatcgtgaccatgtgatcaaattcatatatgagaacaagaatctcacccgagatcaaattggatcggtacccttcggcgaaagcattgatgctctattggaaaagagagtcctggttcgggaccccaaaaatactcccttccactacgtcaaaatgatcccatcaaagcctccaaaagagcaagttcagcacccatttaatgaatacgaggaagcgccagaagaacagtatctagttgtggatcaatggacacgcaggtcggacctgttgcatgagataaaacccggtcaggggaagagctcttgcaccaaaccctaccgctgggttctcccgatttccagagcgactgttgatgaggttcctcggcgtgccgctaagtgcggtatgcttatcccttccatcattcacgaattggaggttcagctcatcgcgaatgaactgtcctcgacacttttggcgccagttggtatcacagatctgcaattggtgattgaagccatcagctcgcgtagcgctgcagagcctgttgactatgaacgtattgaatttttgggcgattcggttttgaagtattgcactgttattcaagcctactctgaacatcccttttggcccgaaggtctactcaaccatttcaaagaccgactagtctccaatacccgtttgactcgcatgtgccttgagacaggcctttccaagttcattttttccaaaacatttactggaatcaagtggagaccgctatatcgagacgaattcctagataagaagccagtcgatggtgtatcaaggtttgttggtccaaagactcttgctgatgtggtcgaggcacttgttggagcctcctaccaggatggaggaatcagcaaagctctggagtgcatcaaggttttcttgggcaccaagtgcaattggcatgatgacaaagtcgccagagacatactcttccgagcagcaattagcgacgtaccgttgccccccacgatggagcctttggaagagctcatcgggtacacatttcagaagaagtctctactcattgaggcaatgactcacgggtcgtatgcggctgatgggcagcagcgatcttatgaacaactcgagtttcttggagatgcggttcttgactacattgtcgtaacccgaatgttccaatctgaccccccagtgcccaatggacgcttacacatggtcaagactgccatggccaacgctgatttccttgcttttacaaacatgcaacatggactacgccggcctgaagttgaaataaatgagaacggcgaaccagtgcctacagaagtttcactgccgatatggaaattcatgcgtcatagctctccagagatgggtagaatcatgaatgagacccaggcccgatttgagagccttcaagaggaaatcaatgaggctaggacgaatggtaaacactacccctggacacttctcgctcgtcttcacccgaagaagttctactccgatattttcgaggctaccctaggtgccatttgggttgattcaggagatatcgaagtatgcacagcctttcttcacaagttcggcgtcttgccgtatcttgaccgaattctcagcgataatattcatgttcaacatcctaaagaggaactcgccaaactagcaatcgaccagaaaatgacgtatgattatacggctgttgatgggcctataaaggagtacctctgcacggccaaggttggagatcgcgtcgtgggagtcgtgtcaggggcactcaataaggctgaggcaatgaccaaggctgccgaagagggcgtgaattttttgaatggggagcagaaacgtgcagagaaggcggctcaggatgaaatggcgcgatttcttgttgccatggaactcatttag

SEQ ID NO: 335 - DNA, 156 bp, Verticillium nonalfalfae
  source 1..156: mol_type = genomic DNA
tcatgaccacagtcatgagttctcaccgaatgaagacccagggtcactgatcgactggagccatctgctgtcgaccaaagaggttgagtacttgccttgggatgaagatcacagtcccagcttctatcaaagcaagtttgtgattgatccatacac

SEQ ID NO: 336 - DNA, 156 bp, Verticillium nonalfalfae
  source 1..156: mol_type = genomic DNA
agaaggtcaacgatctactgccacaggcgacaaacaagaagccatatgctagggtttatccggcaccgtgggcgaaagtcgacacgattccattagatcatgcttactttggggcgttgatccctttcatttcacacattgtcgaggttcgactgg

SEQ ID NO: 337 - DNA, 2877 bp, Verticillium nonalfalfae
  source 1..2877: mol_type = genomic DNA
atgcccggcatcgctcgcaaggtcgtcatttgcgcggcgatcgacggcctcatcgtacagcctctgtcctccaaagggcagcgccctgcgcagcccgtccgcattggatatggtgacggtgccatttccccagcgccgcgggatcaactccctgatctcaccaagcccaacgcctcgttcgaggcttttggtgttgtgggcctgattaccctttcaaaactgaatttcctcattacaattacccgtcgacaccaggtcgctcaaattctaggatttcctatctacgttgtcaccgaggttgcgattacaccatgcgcctctcgccaggaagccgaggatgccgttcttcggacctccgtgcagctgcagacccgtactgatgatacggacacagaggattcggacagcgatagtaccatcgagttaatggcccacgctgtcgatgaggtcgacgatcagacgcagtcagagggctccatctcagcaggcgttaagagcaccgtcgccgaagacgtcatgagtcgtaaggggggctatggtcgattcgcccagcgctggttcagcagctccggctggatgcagggccagaaacgcaacgctggctggagctacacgacgaccgagttgcctcgagcttcgatggaccagcgcccggacctggagcccccggcggcatcgaaggtgcctctggaagaagaggacgacagagtcaacgaagcaaaggcgtcttctctgcttcccaaattgctccgaactgcgcaaattctttacgggtcatctaggagcttcttcttctcgtacgacgtagacataaccaggcactgggcgactcgagcacaatctccatctggtgagctgccactataccgtcgcgtcgaacctacattcttctggaaccgaaatacttctcagccattcattgattccggaaacgatgcgctagttctcccactcatgcagggattcgtcgggcagagggagtttaccatggataagagcccaccgcagcatgacgaagacgcgaataacgcactggaaatgtcaaacatgtctgctccaacatctccgccagggtcgccccctacagaagcgattcgcggctccctggatctccggggctcggaaaagaagttcctgattacggtgatttctcggcggtccattaagagagccggcctccgatatttgcgccgcggtattgatgaggatggccatgtggccaacgctgttgagacggagcaaattctgtctaactcttcgtgggatcagagctctaaaatttactcgttcctgcaaattcgcggcagtatacccctattcttcacccagagcccgtactcattgaaacctgcaccagtcatacaacactccacagaggcaaactttgaagcctctaagaagcacttcgagcgccttcaccgagaatatggtatgctgcaagtggtcagcttggtggaaaaacacaatgttgaggctacaatcggcaacgaataccagcatactgtcgcgaagctaaacgaaaccgtcttcagcgatcatacttctcaagtcccgttcgaatggtttgatttccacgcagcctgtcgtgggatgaagttcgaaaacgtcagcctccttctggatgccatgaggaccaagcttgatgagcttgggagcactgtcgaaaaggatggagagctgttccttcgccaacgtggagtgcttcggacaaattgcatggactgtctcgaccggacaaatgtttgccagagctcatttgcaaagtatatgctggaatcacagctcaaggctgagggatacgatctgagcatgcaagtagaccagcaatctgcatggttcaacacgctgtgggcggacaacggagactccgtgtcgaagcagtacgcttctacggcagccatgaaaggcgactacacacggtacaagactcggaactacagaggaatgctcaatgatcttggcttctcattgacaagattttataacggcatggttaatgactatttcagtcaagctgccattgacttcctccttggcaacgtcacttccatggtctttcaagagttcgaagctgaaatgatgacgaaagatcccgccatgtcgatgctcaagatgcgtgaatcagctatcgaattatgccagaaacgcgtcatctcagaccaaaaagaggactttgttggcggatgggtcatgctgagccctccaacgtctgacgttgtcaagtcacagacacccttcgaagaagtgattctccttctcacagatgctgccctttatctctgtcgctttgactggaagcttgacaaggtatcgtcgttcgaacgcgtcgacctcgcgcatatcgtgggtatccgcttcggcacttatattacatccacagtttcgcctggtcacaccgacgagagtaaaaacattgggttcgtggtgtcataccagcctggaaagactgacatccaacgcacaaatactcgtacgctttcgagcaactttatcaaacaacctggtcaggtcgaagaagagtcattggccgcggtggcggtcgacgagcctgcggcgctctcggggctgatgggactgctgtccggtcatcgacccaaaccccaaacaccgactcgaaagctcgccttcaaggcgccgtattcgcagtcgtcggccgcggtgacgggtgaggggccacgcttgagcgagacacagcaggttgtgagtatctgtgctgatgtcgagagactggccttcaaagcgcagcctggaaaggacgtgcctggaaccaagagcatcatcgagaggggtgacatcatctcattggaggacgcacaagcaaacacgacgattttagaccagctgagccactctatcaagaggcttgtttgggcgtag

SEQ ID NO: 338 - DNA, 4014 bp, Verticillium dahliae
  source 1..4014: mol_type = genomic DNA
atgtcagatctagcagtcggtcagatcgtccagctgaccgacggccgcaatggcgtcgtacgcttcgccggcaccacccatttcgcctcgggcgaatgggtcggcattgaattggaggatgactctggaaagaacgacggcagcgtccagggcgagcgctactttgactgttccatggggcgaggcatgtttgtgcggccgtcgaccctgaccattctcgcccaggctccagctccagctgcggcgccggccgccagacctaccgtcaggaagacgagcaggcccagcagcttcgtgcccggcacgggcagggtgtcgagcgtcaccgacccgagcatggccaagcggatgagtctgaatgctgctagtcccagcccggccccgcgcacatctcgacctgcgagccttgtacggtctcctacgaagtcgccaacgaagcaaattggttcgaccacctccagcaccgcaccctcccggaccggcacaccttcaaacgccaaaggcaccaccgccacgcgaactcgcccggcagtaggtgttcgcacctccatgggaccccctccgattccctccgcacgagtgagccgacagccatcaacatcgtcagcgacaggtcgccctcccgccaggccgctttccaatcgactctccctgtccggctcgcgcagcgtgcccaagccagaccccctccgacgcccatcgaccgattcgcaagcaggcagggagcccggctcggcagcagacagcggcgacgacggcaggagcagctcgccatctaagggagcggctgatctggcctcaccgcatgccacgagcccggtgcaagctcggaccaacgcgctcgagcggttgacctcgggcaggacggcgaccacgacggcacggtcgccagccacggcgtcgcctcgaacggccggcggcaacacggctgcggcgcgggagaacgaagacctcaaggcgaagctccgtgtcatggagcgcaagaggctggaagaccgggagaagctgaagcagctggagaagctccaaggcgaacgcgacaagtttgagtcgatcatccagaagctgcagacaaagtaccaaccccagcaaacggagaatgcagagctccgcaagcagatcaaggaggccgagacgcggttcgaggccgtggagcagatgcaggccgagcatgagacggccttggagctggccacgctggaccgtgagatggcggaagagacggccgaagtgctcaaggccgagctcgaagcgttgaagcagaaatcagaggagcttgagctcgaggtggaaatcttgcgagaggagaacgaggagtttagccagggcatgacgcccgaagagcggtcaagcacgggctggctgcagatggagaggacgaacgagcggttgagggaagcactgatacgattgcgcgacctgacccaggctcaagaggccgagcttcgagaccagatcaaggccctggagtctgacctgcaagactacagtaccgtgcaggagcagttcgcggcctccaaggaaaagctggcacagtctgaaagcgcggtcgaggatcttcgccaacagctcgacaatgctcttggagcggaggacatgattgaggacctcaccgagcgcaacatgagcatggccgaagagattgaggagctcaaggccgtcatcgaggatctcgaaaacctcaaggagatcaatgatgagctcgagattaatcacgtacaaaacgagaaggagatgcaggaggaactcgacttcaaggacagcgtcattgcggaacaggcccgacgagccggtcagcaagaggaagccctcgaagacatggagtacaccctttcgaggttcagggaactcgtcacgagcctgcagggcgaccttgaggacatgcgcgcatcgcacgctgtcaccgaggccgagtcggagcaattagacagcaagtcccgcgccatgatggacctcaacatgaagctccagatctcggctgccaagacacaggtcaagacgatcgacctggagcttcgccgtctggaggcgcaagaagcggagcagcacctcgaaatcgtcaagctcttcttgcccgagacctaccaggaggaccgcgactccgtgttggcgctccttcgcttcaagcgactggcgttcaaggccactctgctccagggcttcctcaaggaacgcgtcacgggccagccgcaccccggccacgaggacgacatgtttgccggctgcgatgccattgacaagctcacctgggtggcggccatgtgcggccgcttcatcaacgccatcagccactgctcgatcgagcagttccagcactaccagggcgctctgtttgagctggagccggtggagcgggcggtgaacgggtggatcgacggcctcaggagggatgaactcaaggaggccaagtgcgccagcgagctgcagcgctccattgcgctcatgacccatctcgccgaggttcaccttacggacgatctgcagagcttcgccgacgccatgcacatgcgcgctctcgtcgtgcaaagccatctggattcggccgccgcggccattacgaccgccagggccatggtccagagagtcatccccgagtctggcgaggacgacgagatggcacagcacttcagcaagaaggccgagcacgttgtcggccagacccgcagcaccaaggtcattgccagcaaggccgtgcgcgccctcgaggatctcaagaaccgatctctctcgctggctcgggacgacagcacgcaagaggcgtttgagcagtgcgaagaggccgcaaaggacctcgccgcactggcgcggcagattggcctcgacttgcacaagctgctgcacgaggagggcaggaccgagccatacacgcacacggaggtgcagaacacgatggcgcagacggccctgtcggccggttcgtcgaccgactcggatctcttctcgacctacgtgaccaagctccgggtcgtcacgcagcagatcacggaccttgcgggcctcagctctgacctgacgcagacgcaagagtttgagctcaacccggccccctggaagctccgctctcaagaactcaaggctctcaagacgatccccgtggatgccgaagaggagctccgccgcgtcaaggaggagcacaacgaggcgcgccgcacgattgcgcagcgcgacgagagcctcagcacggcgacgctcaagattgagacgctcgagtcccgcatgcgcgacgcgcaccaaaaggcgtcgcgcatcgccgaccttgaggcccagatcgagacggccaagcagcgcgcggcggcgctcaaggaggacattgaaaagggcgaccgcgagctcaaggcgctcgaggcggaccgcgaccagtggaagaagattgcgggcgacagcaaggcgttcgccggcgccaacgacgctggcgccgccaagtcgggccaggaacgggccgtggcgacggcgcgcgagatggacgccctcaaggccgacattgcgcacctgcaggcggcggtgcggtacctgcgcgaggacaaccggcgggcgcggctcacggagcaggccgactacgactggctcgcggcgccgctgcgcaaggcggcgtcgccggccgagcagcggcgcgcgctcgtcgtggccgagggccgcgacgcgctcggcgagctcgtgcggttcgcgacccaggccaaggtgtacgacctccaggacctgccgcaggacaagctcgcgtggcggccggccaagagcacgccgcagtaccacgccgcgcggcaggcggaggacctcgcggcctggaagggctggcgcgactcggtggtgcagaagacggaggtcgtcgccgggcgcaggggcggtggtgctccggacatgaagagggtcgaggcgctgcggcggagcgcggcggctgcgcgactgcagattcggctgccggggcccgacggcaagatggcgcggggcagcggacgggatgtgcagattgtcggatcgagggagtgggagggtctgcaggggcggttggccgtgtaa

SEQ ID NO: 339 - DNA, 1089 bp, Rhizoctonia solani
  source 1..1089: mol_type = genomic DNA
atgcgctccactgctactactttctcccttctctctttggctcctgccctgtttgcatccccagttgagcgttgtacaggtaccatatcatctttagatgatgttgccaatgcaatcaaatgtactactatcaatatcaactcgttcacagtacccgctggaaagactttccaactggatgcccccagtggcgctacagtcaacctattgggagacgttacgtttggcgtctctgcatgggcgggaccactattccaattgaccggaacaagcatcactttcaacggcaatggacataccttcaacggccaaggcgaacaatactgggacggtcttggaagcagtggaacgactaagcctcaccccatgatgaaaatcaaatcgtccggaacgttctcgaacgttgtagttaaaaactccccacagcaatgctttagcttcggcaacagcgcagctctgactgtttccaaggtcacagtcgacaattctgcaggagatgctgcgaacagcaagagtggtggtaaagctgctggtcataacacggacgggtttgatgtctcggtttccaatctcactatcgaagactccaccgtgcacaatcaagatgattgtctcgcaattaataaaggctccaacattattttccagcgtaacacatgcaccggtggacatgggatctcggtgggctctatcgactcggatgtcacagtcagtggcgtacagatccttaataatgtggtcacgaacaacgacaatggtcttcgcatcaagaccaaggctgctgccactggctccactgtatctggcattacctacaccggcaacaccgtcactggttgcaaaaagtacggtgtcatcattgaccagagttacccagatacccttggtactcctgggactggcgtcaaaatttctggcgtgaccttcagtggtaccaacaccgtttccgtcgttagtggagccaaggaggtcgaagtcaactgcggctcaggttcttgcacaggaacttggaattggtcgggtctcaaggtttctggtggatccgcgggggccatcaattactctggtatcaccggtttctcgctttaa

SEQ ID NO: 340 - DNA, 169 bp, Botrytis cinerea
  source 1..169: mol_type = genomic DNA
ttcgttccaggagttacacgcaaagatcacttcactggtggaccagcaaaaagatagtaaacatatcgggaaaatatcgatatatattctccgaattctacgagatatcagagcagaattacctagtaaccctgcactacaaaagtttggactctcacttgtctcatca

SEQ ID NO: 341 - DNA, 179 bp, Botrytis cinerea
  source 1..179: mol_type = genomic DNA
ttcgtgctctcgtcgaaagcaaagacaataaagaagaacaaatggagcgcgagttggagggattgcgaagaggaagtgttagcaatcctactacgcatcgtactagtgccatgagcagcggaactgtgactcaggataggaattctctccaagacaataagagcacagttgtaagctgg

SEQ ID NO: 342 - DNA, 168 bp, Botrytis cinerea
  source 1..168: mol_type = genomic DNA
acgttgttcaaagtgcagtggcaaagcgagcacttgaaatgcagttaaagaatgagggactagatgtcactctacaaattgatcaaactcaacaatggttcaatactttgtgggccgacaatggtgacgccatttctaagcaatacgcttctacagcagcattgaagg

SEQ ID NO: 343 - DNA, 259 bp, Sclerotinia sclerotiorum; identical to SEQ ID NO: 312
  source 1..259: mol_type = genomic DNA

SEQ ID NO: 344 - DNA, 200 bp, Sclerotinia sclerotiorum; identical to SEQ ID NO: 313
  source 1..200: mol_type = genomic DNA

SEQ ID NO: 345 - DNA, 230 bp, Sclerotinia sclerotiorum
  source 1..230: mol_type = genomic DNA
gcattggctgcgctgaagacgaaacctttattgaaagatgaaagtattcgagatttggagggattgagattagatgtatgtgagcggtggtttggtgatgaaattctttactttacaccttatgttcgacacgatgatttggaaggatcattagccgttgagacattaagaggttgggcgaagaaagcatcagaggtactactggaaggattcacaaagactcttcaagg

SEQ ID NO: 346 - DNA, 196 bp, Sclerotinia sclerotiorum
  source 1..196: mol_type = genomic DNA
tcaatgccagagattgacggttactcttcagcagcggaggatttctgtgaattgtgcgaggcatcaggtcatgatgttctacattgccccatgttcggtcctaatggtaatagtggcaactctagagaggagtctcctaaagagcaacgaacaggaaaagacgttgtcatggaaggactcaaactatcacccaaac

SEQ ID NO: 347 - DNA, 194 bp, Sclerotinia sclerotiorum
  source 1..194: mol_type = genomic DNA
gcttacatttccaagcaggaaatcaatggccgcttgactgaaataatcattaacaataccgctgtaaaatctagagatagaaagtcccatgtctgtcaaagcacccttgtaatcacgctttctagtacgagtgaagtctcccttcagggctgctgtagaggcatattgcttagagatagcatcgccattatcag

SEQ ID NO: 348 - DNA, 753 bp, Fusarium oxysporum
  source 1..753: mol_type = genomic DNA
atggagacggatatgcaccgagtcatccgcacccaggacctttctgacgaccactgccagtacttcatctaccagaccctccgcgccctcaaggccatgcactcagccaacgtgctgcaccgagacttgaagccctccaacctcctcctcaacgccaactgtgatctcaaggtttgcgattttggtcttgcgcgatccgctgcttcccaggaggacaactccggtttcatgactgaatacgtcgcgactcgatggtaccgtgcgcccgagatcatgttgactttcaaggagtacaccaaggctattgatgtgtggtcggttggctgcattctcgccgagatgctcagcggcaagcctcttttccctggcaaggactaccaccaccagttgacactcattctggatgtgctgggcacgccgactatggaggattactacggaatcaagtcgcgccgcgctagagaatacattcgatcgctccccttcaagaagaaggttcccttccgaactctattccccaagacctcggatctggccctcgacctgctcgagaagctcctcgcattcaaccctgttaagcgcattaccgtggaggaagctctgaagcacccataccttgagccttaccacgatcccgaggatgagccaacagcgcccccgatccctgaggagttctttgactttgacaagcacaaagacaacctgagcaaggagcagctgaagcagttgatctaccaggagattatgaggtaa

SEQ ID NO: 349 - DNA, 1074 bp, Fusarium oxysporum
  source 1..1074: mol_type = genomic DNA
atggccgagttcgtacgcgcccagatctttggcaccacattcgagatcacctcgagatactccgatctccagcctgttggcatgggagcttttggcctcgtttgctctgcccgggatcaacttaccaaccaaaatgtcgcagtcaagaagatcatgaagcctttcagcacacctgtgctcgcaaagcgcacataccgtgagctcaagctgctcaagcacctcaagcacgaaaacgtcatttctctcagcgacatctttatttctcctttggaagatatctattttgtcacagagctcctcggtaccgatcttcaccgattattgacatcgcgccctcttgagaagcagttcatccagtacttcctctaccaaattatgcgaggtctgaagtacgtgcattcggccggcgttgtccaccgcgatctcaaacccagcaatatcctcgtcaacgaaaactgtgatctcaagatttgcgactttggtcttgcacgaatccaggaccctcagatgactggttatgtctccacacgatactaccgagcccctgaaattatgctcacctggcaaaaatacgacgtcgaggttgatatttggagtgccggttgcatttttgctgagatgcttgagggcaaacctttgttccccggaaaagatcacgtcaaccaattctctatcatcactgagctacttggtacccctcctgatgatgttatcaacaccatcgccagcgagaacacactgcggttcgtgaagtcgctgcccaaacgcgagcgacagcctcttcgtaacaagttcaagaatgccgacgattcggctattgatctgctggagcgcatgcttgtcttcgaccctaagaagcgaataactgccacagaggccctgtcccacgactatctctctccctaccacgaccccacagacgagcccgtggcggaggagaagtttgactggagcttcaacgacgccgatctccccgttgatacatggaaaatcatgatgtactcggaaattctcgattatcataacgtggaagccggagttactaacatggaggagcaattcaacggacaataa

SEQ ID NO: 350 - DNA, 1965 bp, Fusarium oxysporum
  source 1..1965: mol_type = genomic DNA
atgtctgcctccgactcgatcccggcccccccggaggactggaaggatctgtcgacacctgcatctccaggctctgaagattcgtcagaacccagtacgccgctcgaatctcccggtcatgatagccccagtgagcctcctcgaagagtaccatctctgcgctccgtttccgatcctcgcaacatgaatccgaactcaactgctatgggtgttttaggcatggccagacgccctgtacaaacatcctcgagttttgctggaagtagtagtgcctcggtggaaaacagtataatggccaaagcccgagcattacatcaacaacgcatgcagaagggcatgtctcccgctggaatccccggaacaccctcggggtcatcacctacggccagcgtcgctaacggattccctaccaatctgggattgccgcccaatatgcaacgaccgcacgcaccacatgtaaattcagctcctgcgataacgaagccctcgctgagtgagagaagggccatgggcggcggcatgggcatgaagctgtctgatatgggtagacccagccctgtcaccgccactgggaagaaacgggggcctcctggaaagctttctgatatcacaggtgatgcgccaggtagtcaacaatccaacggaacagggggtgggcaggggtcaaaaatggacgatttcaagaaatatattgacacagagaagggttgggtgacctttgatggcgctgccacaatcacacggacaggtgtcaactttgccaatggccaaaccttcagcatatctcttgatgaagttgaagtcttgaccgagctgggtaaaggaaactacggaacagtctacaaggtcaagcatgccaagcgaagagtccctcgcttcggacaaggcctctcgagaaagccccttcctgttcagtattcgcagtcggacccttctcccattggatctgcggaagactccgccgagggcttgccagacacgaccgacggtacaacgggcacagtaatggcgatgaaagaaatgcgcctggagctcgacgacgccaaattcacaaccattctgaaggagctcgtcatcttacacgagtgtgtttctccgtatatcatcgacttttacggcgccttcttccaggaaggtgctgtttacatgtgtattgagtatatggatggcggatctatcgataagctgtataatggtggtatcccggagaatgttcttcgaaaaatcacatactctaccgtgatgggtctcaaatcactgaaggaggagcatagcattattcatcgcgatgtcaaaccaacaaacatcttggtcaatacacgaggccaggtcaagatttgcgattttggtgtcagtggtaatctggtagctagtatagcgcgaaccaacatcggctgtcagagctatatggcccccgagagaatctctggtggtggattcgcacaagccggtaattccgatggctcatacagcgttcagagcgatgtctggagtttgggcctgaccatcatcgagtgtgctaagggcgcttatccttacccaccggaggtctcttctactattttcagccaactgagtgctattgttgaaggtgaaccacctgctatgccagaggacacttactcggacatggccaaggattttgtgaaaagctgtcttcacaagattcctatgaagcggccaacctacgccatgctattgaaacatccgtggctcgtcgaatttacaaagcctcaaacaatcacggaagaagctgaggagggtgatggagttgatacggtcgcggaagctgttggtaaaattgatttgagctcatcaactgcagatactgaagtggcagattgggtcaatggcgttctacaacgagagaaagatggcctgaaggaggacgggcccttgaaaccagcactacacaatgcaccgcttgatagcgtcagtcctatgtcaagcccaaaggatgcatga

SEQ ID NO: 351 - DNA, 108 bp, Medicago truncatula
  source 1..108: mol_type = genomic DNA
gcnttyathcarytnwsnaarccntgyathwsngayaargartgywsnathgtnaaraaytaymgngcnmgntgymgnaarggntaytgygtnmgnmgnmgnathmgn

SEQ ID NO: 352 - DNA, 120 bp, Fagopyrum esculentum
  source 1..120: mol_type = genomic DNA
gcncartgyggngcncarggnggnggngcnacntgyccnggnggnytntgytgywsncartggggntggtgyggnwsnacnccnaartaytgyggngcnggntgycarwsnaaytgyaar

SEQ ID NO: 353 - DNA, 120 bp, Fagopyrum esculentum
  source 1..120: mol_type = genomic DNA
gcncartgyggngcncarggnggnggngcnacntgyccnggnggnytntgytgywsncartggggntggtgyggnwsnacnccnaartaytgyggngcnggntgycarwsnaaytgymgn

SEQ ID NO: 354 - DNA, 558 bp, Capsicum annuum
  source 1..558: mol_type = genomic DNA
atgatgaaygcnaayggnttywsnggngtngaraargartayathmgnaarcaycayytncaycarccnaargaraaycartgywsnwsnttyytngtnaarcayathmgngcnccngtncayytngtntggwsnytngtnmgnmgnttygaycarccncaraartayaarccnttygtnwsnmgntgyathgcncarggngayytngarathggnwsnytnmgngargtngaygtnaarwsnggnytnccngcnacnacnwsnacngarmgnytngarytnytngaygaygargarcayathytnwsnttymgnathathggnggngaycaymgnytnmgnaaytaywsnwsnathathwsnytncayccngargtnathgayggnmgnccnggnacnytngtnathgarwsnttygtngtngaygtnccncarggnaayacnaargaygaracntgytayttygtngargcnytnathaaytgyaayytnaarwsnytngcngaygtnwsngarmgnytngcngtncargaymgnacngarccnathgaycargtn

SEQ ID NO: 355 - DNA, 981 bp, Phaseolus vulgaris
  source 1..981: mol_type = genomic DNA
atgaaraaraaymgnatgatgathatgathtgywsngtnggngtngtntggatgytnytngtnggnggnwsntayggngarcartgyggnmgncargcnggnggngcnytntgyccnggnggnaaytgytgywsncarttyggntggtgyggnwsnacnacngaytaytgyggnaargaytgycarwsncartgyggnggnccnwsnccngcnccnacngayytnwsngcnytnathwsnmgnwsnacnttygaycargtnytnaarcaymgnaaygayggngcntgyccngcnaarggnttytayacntaygaygcnttyathgcngcngcnaargcntayccnwsnttyggnaayacnggngayacngcnacnmgnaarmgngarathgcngcnttyytnggncaracnwsncaygaracnacnggnggntgggcnacngcnccngayggnccntaygcntggggntaytgyttygtnmgngarmgnaayccnwsngcntaytgywsngcnacnccncarttyccntgygcnccnggncarcartaytayggnmgnggnccnathcarathwsntggaaytayaaytayggncartgyggnmgngcnathggngtngayytnytnaayaarccngayytngtngcnacngaywsngtnathwsnttyaarwsngcnytntggttytggatgacngcncarwsnccnaarccnwsnwsncaygaygtnathacnwsnmgntggacnccnwsnwsngcngaygtngcngcnmgnmgnytnccnggntayggnacngtnacnaayathathaayggnggnytngartgyggnmgnggncargaywsnmgngtncargaymgnathggnttyttyaarmgntaytgygayytnytnggngtnggntayggnaayaayytngaytgytaywsncaracnccnttyggnaaywsnytnttyytnwsngayytngtnacnwsncar

SEQ ID NO: 356 - DNA, 1020 bp, Oryza sativa
  source 1..1020: mol_type = genomic DNA
atgwsnacnccnmgngcngcngcnwsnytngcnaaraargcngcnytngtngcnytngcngtnytngcngcngcnytngcnacngcngcnmgngcngarcartgyggngcncargcnggnggngcnmgntgyccnaaytgyytntgytgywsnmgntggggntggtgyggnacnacnwsngayttytgyggngayggntgycarwsncartgywsnggntgyggnccnacnccnacnccnacnccnccnwsnccnwsngayggngtnggnwsnathgtnccnmgngayytnttygarmgnytnytnytncaymgnaaygayggngcntgyccngcnmgnggnttytayacntaygargcnttyytngcngcngcngcngcnttyccngcnttyggnggnacnggnaayacngaracnmgnaarmgngargtngcngcnttyytnggncaracnwsncaygaracnacnggnggntggccnacngcnccngayggnccnttywsntggggntaytgyttyaarcargarcaraayccnccnwsngaytaytgycarccnwsnccngartggccntgygcnccnggnmgnaartaytayggnmgnggnccnathcarytnwsnttyaayttyaaytayggnccngcnggnmgngcnathggngtngayytnytnwsnaayccngayytngtngcnacngaygcnacngtnwsnttyaaracngcnytntggttytggatgacnccncarggnaayaarccnwsnwsncaygaygtnathacnggnmgntgggcnccnwsnccngcngaygcngcngcnggnmgngcnccnggntayggngtnathacnaayathgtnaayggnggnytngartgyggncayggnccngaygaymgngtngcnaaymgnathggnttytaycarmgntaytgyggngcnttyggnathggnacnggnggnaayytngaytgytayaaycarmgnccnttyaaywsnggnwsnwsngtnggnytngcngarcar

SEQ ID NO: 357 - DNA, 759 bp, Solanum chilense
  source 1..759: mol_type = genomic DNA
atgaarttyaayathgtnwsnccngtngcnytnwsntgyytnttyttyytnttyytnacnggnacnytngcncaraaygcnggnwsnathgtnacnmgngarytnttygarcaratgytnwsnttymgnaayaaygaygcntgyccngcnaarggnttytayacntaygaygcnttyathgcngcngcnaaywsnttyccnggnttyggnacnacnggngaygayacngcnmgnaaraargarathgcngcnttyttyggncaracnwsncaygaracnaarggnggnwsngcnggnacnttyacnggnggntaytgyttygtnmgncarathgaycarwsngaymgntaytayggnmgnggnccnathcarytnacncaycarwsnaaytaygarmgngcnggncarggnathggngtnggncargayytngtnaayaayccngayytngtngcnacngayccnathathwsnttymgnacngcnathtggttytggatgacngcncargayaayaarccnwsntgycayaaygtnathathggncartggacnccnwsnccngcngayacngcngcnaaymgngtnccnggntayggngtnathacnaayathathaayggnggnytngartgyaayatgggnccnaayacngcngtngarwsnmgnathggnttytaymgnmgntaytgyggnatgytnaaygtnccnacnggngaraayytngaytgyaayaaycaraaraayttygcncarggn

SEQ ID NO: 358 - DNA, 998 bp, Hordeum vulgare
  source 1..998: mol_type = genomic DNA
ctacgacagtagcgtaagcgtaacaccgagtacgtactctgtgctttgttggctcgcacaatgagatcgctcgcggtggtggtggccgtggtagccacggtggccatggccatcggcacggcgcgcggcagcgtgtcctccatcgtctcgcgcgcacagtttgaccgcatgcttctccaccgcaacgacggcgcctgccaggccaagggcttctacacctacgacgccttcgtcgccgccgcagccgccttcccgggcttcggcaccaccggcagcgccgacgcccagaagcgcgaggtggccgccttcctagcacagacctcccacgagaccaccggcgggtgggcgactgcaccggacggggccttcgcctggggctactgcttcaagcaggaacgtggcgcctcctccgactactgcaccccgagcgcacaatggccgtgcgcccccgggaagcgctactacggccgcgggccaatccagctctcccacaactacaactatggacctgccggccgggccatcggggtcgatctgctggccaacccggacctggtggccacggacgccactgtgggctttaagacggccatctggttctggatgacggcgcagccgcccaagccatcgagccatgctgtgatcgccggccagtggagcccgtcaggggctgaccgggccgcaggccgggtgcccgggtttggtgtgatcaccaacatcatcaacggcgggatcgagtgcggtcacgggcaggacagccgcgtcgccgatcgaatcgggttttacaagcgctactgtgacatcctcggcgttggctacggcaacaacctcgattgctacagccagagacccttcgcctaattaattagtcatgtattaatcttggccctccataaaatacaataagagcatcgtctcctatctacatgctgtaagatgtaactatggtaaccttttatggggaacataacaaaggcatctcgtatagatgctttgct

SEQ ID NO: 359 - DNA, 978 bp, Oryza sativa
  source 1..978: mol_type = genomic DNA
atgmgngcnytngcngtngtngcnatggtngcnacngcnttyytngcngcngcngtncaygcngarcartgyggnwsncargcnggnggngcngtntgyccnaaytgyytntgytgywsncarttyggntggtgyggnwsnacnwsngaytaytgyggngcnggntgycarwsncartgywsngcngcnggntgyggnggnggnggnccnacnccnccnwsnggnwsnggnggnwsnggngtngcnwsnathgtnwsnmgnwsnytnttygaycaratgytnytncaymgnaaygaygcngcntgyccngcnwsnaayttytayacntaygaygcnttygtngcngcngcnwsngcnttyccnggnttygcngcngcnggnggngaygcngayacnaayaarmgngargtngcngcnttyytngcncaracnwsncaygaracnacnggnggntgggcnacngcnccngayggnccntaygcntggggntaytgyttyaargargaraayggnggngcngcnggnccngaytaytgycarcarwsngcncartggccntgygcngcnggnaaraartaytayggnmgnggnccnathcarytnwsntayaayttyaaytayggnccngcnggncargcnathggngcngayytnytnggngayccngayytngtngcnwsngaygcnacngtnwsnttygayacngcnttytggttytggatgacnccncarwsnccnaarccnwsntgycaygcngtngcnacnggncartggacnccnwsngcngaygaycargcngcnggnmgngtnccnggntayggngtnathacnaayathathaayggnggnytngartgyggncayggngargaygaymgngtngcngaymgnathggnttytayaarmgntaytgygayathytnggngtnwsntaygaygcnaayytngaytgytaywsncarmgnccnttyggnwsn

SEQ ID NO: 360 - DNA, 1098 bp, Brassica juncea
  source 1..1098: mol_type = genomic DNA
aaataaaattcatcaaaataacccatccaaaagagtccaaaataacaaatgacaattccacctttattttaacaaaaattatattcaaactagacaaacatgataattgtgatatagtttctcaacaagtttcaaaaacaattatagttttccaccataattgtaaacacacatattttcgccaaaaccataaaatatatattctcgctaaaacaacaagaaaaacatttgtccgtgaattccatctcttctcataaacttcatcttccatcgtatcaagcgaacccatcctattggggggtatgtgattcatgagccttaattagggtggtacagtcagcgactcctgagcttcagagagggtagtccagcagctagtgactctgctagagatagtgtggcccagctagtgagtagtgactcatgaggtagagagagggtggtccatcatatatcgtgttagacaaattctatatagacaatgaggtaaatgtgggatatgaaggtggtggcaaattttagaacaattagtatttaagtatagtaaacataaaaacaaaccagcactgcttatcttcgattctatcaagcgaacccaccttatattgaattaatttatggtagcagtgattcgtgaacgtcagagagggtggtccctctagtgactcatgagctagagagagggtggtccagctatcgtgtagaaatattctatagaccattagataaacgtgccaaatgaacttggtggtgacaaaatagaagtttagaatgtttgggttcccggtaaaaaggtgaaaccacctttttttttttttttttttaccaacgttgaattggcctaatgataaaagggttacgcttgtaactaccgccacccaggtttaattcacggtgggagagactatttataatgcttaggtttctggcaaagaagtgaaaccactttttttctttccagaaaaaatagaagtctagaaaacataaaaacaagtatataaaattcgatgtgatttaacactaactgattttgtacattgcatgttgctatatatacccttacttgcctcttaaaacaaccatacagctcagagaaac

SEQ ID NO: 361 - protein, 36 aa, Medicago truncatula
AFIQLSKPCISDKECSIVKNYRARCRKGYCVRRRIR

SEQ ID NO: 362 - protein, 40 aa, Fagopyrum esculentum
AQCGAQGGGATCPGGLCCSQWGWCGSTPKYCGAGCQSNCK

SEQ ID NO: 363 - protein, 40 aa, Fagopyrum esculentum
AQCGAQGGGATCPGGLCCSQWGWCGSTPKYCGAGCQSNCR

SEQ ID NO: 364 - protein, 186 aa, Capsicum annuum
MMNANGFSGVEKEYIRKHHLHQPKENQCSSFLVKHIRAPVHLVWSLVRRFDQPQKYKPFVSRCIAQGDLEIGSLREVDVKSGLPATTSTERLELLDDEEHILSFRIIGGDHRLRNYSSIISLHPEVIDGRPGTLVIESFVVDVPQGNTKDETCYFVEALINCNLKSLADVSERLAVQDRTEPIDQV

SEQ ID NO: 365 - protein, 327 aa, Phaseolus vulgaris
MKKNRMMIMICSVGVVWMLLVGGSYGEQCGRQAGGALCPGGNCCSQFGWCGSTTDYCGKDCQSQCGGPSPAPTDLSALISRSTFDQVLKHRNDGACPAKGFYTYDAFIAAAKAYPSFGNTGDTATRKREIAAFLGQTSHETTGGWATAPDGPYAWGYCFVRERNPSAYCSATPQFPCAPGQQYYGRGPIQISWNYNYGQCGRAIGVDLLNKPDLVATDSVISFKSALWFWMTAQSPKPSSHDVITSRWTPSSADVAARRLPGYGTVTNIINGGLECGRGQDSRVQDRIGFFKRYCDLLGVGYGNNLDCYSQTPFGNSLFLSDLVTSQ

SEQ ID NO: 366 - protein, 340 aa, Oryza sativa
MSTPRAAASLAKKAALVALAVLAAALATAARAEQCGAQAGGARCPNCLCCSRWGWCGTTSDFCGDGCQSQCSGCGPTPTPTPPSPSDGVGSIVPRDLFERLLLHRNDGACPARGFYTYEAFLAAAAAFPAFGGTGNTETRKREVAAFLGQTSHETTGGWPTAPDGPFSWGYCFKQEQNPPSDYCQPSPEWPCAPGRKYYGRGPIQLSFNFNYGPAGRAIGVDLLSNPDLVATDATVSFKTALWFWMTPQGNKPSSHDVITGRWAPSPADAAAGRAPGYGVITNIVNGGLECGHGPDDRVANRIGFYQRYCGAFGIGTGGNLDCYNQRPFNSGSSVGLAEQ

SEQ ID NO: 367 - protein, 253 aa, Solanum chilense
MKFNIVSPVALSCLFFLFLTGTLAQNAGSIVTRELFEQMLSFRNNDACPAKGFYTYDAFIAAANSFPGFGTTGDDTARKKEIAAFFGQTSHETKGGSAGTFTGGYCFVRQIDQSDRYYGRGPIQLTHQSNYERAGQGIGVGQDLVNNPDLVATDPIISFRTAIWFWMTAQDNKPSCHNVIIGQWTPSPADTAANRVPGYGVITNIINGGLECNMGPNTAVESRIGFYRRYCGMLNVPTGENLDCNNQKNFAQG

SEQ ID NO: 368 - protein, 326 aa, Oryza sativa
MRALAVVAMVATAFLAAAVHAEQCGSQAGGAVCPNCLCCSQFGWCGSTSDYCGAGCQSQCSAAGCGGGGPTPPSGSGGSGVASIVSRSLFDQMLLHRNDAACPASNFYTYDAFVAAASAFPGFAAAGGDADTNKREVAAFLAQTSHETTGGWATAPDGPYAWGYCFKEENGGAAGPDYCQQSAQWPCAAGKKYYGRGPIQLSYNFNYGPAGQAIGADLLGDPDLVASDATVSFDTAFWFWMTPQSPKPSCHAVATGQWTPSADDQAAGRVPGYGVITNIINGGLECGHGEDDRVADRIGFYKRYCDILGVSYDANLDCYSQRPFGS

SEQ ID NO: 369 - protein, 135 aa, Arabidopsis thaliana
MEGKTVIFSVLVMGLVISQIQVEAQKTCCPSQSTRKEFEDCISEGNLQILCSAESGCRDTYVGYCPSGFPYGSLTNSGDVVNVYCKLGCVSSLCGALTSLQKLDTSGKVNVAVERCTKACSTICTKGSKTAVETV

SEQ ID NO: 370 - protein, 61 aa, Vigna mungo
PNPKVFFDMTIGGQPAGKIVFELFADTTPRTAENFRALTTGEKGVSRGRKPLHYHGSIFHR

SEQ ID NO: 371 - protein, 512 aa, Camptotheca acuminata
MENLYYCLALLLSILFIFRHFFRHSSKLPPSPFALPIIGHLHLIRNSLHQVLECLASQYGPILFLKFGTRSILVVSSPSAVEECLIKNDIIFANRPRSMILDLSSFNYSIFSWAPYGHYWRSLRRLAVVELFTSRSLQTSSNIRKEEIHNLLCHLFKFSKSGTQKLQLKYWFSLLTFNIITRLVAGKRCVRDAVAGTDSGKQILEDLEGKFTSKMPFNMCDFFPILRWFGYKGLEKILITLHKERDEFMQGLIDEVRRKRTCSANINSVTNRAKTTLIEALLSLQESEPDFFSDTIIKSIISDMFFAGPETSTITLEWAMSLLLNHPEVLGKLRAEIDDHVGHGRLLDDSDLGKLPYLRCIINETLRLYPPTPLLLPHCSSEDCIVGGYEIPQGTILWVNAWAMHRDPKLWEEPTKFKPERFEGMEGRERYKFMPFGIGRRACPGASMAIRTVSLALGALIQCFEWENVGPDKREMSQGRLTLPKAESLEAVSIPRPSAVKVLSQLEGTCFR

SEQ ID NO: 372 - protein, 105 aa, Nicotiana alata
MARSLCFMAFAILAMMLFVAYEVQARECKTESNTFPGICITKPPCRKACISEKFTDGHCSKILRRCLCTKPCVFDEKMTKTGAEILAEEAKTLAAALLEEEIMDN

SEQ ID NO: 373 - protein, 266 aa, Triticum kiharae
MGVKGGGVLWCLLLAGLLLLAVACAAERDTEKEKEEEIRWCEEDCDWKAGQDTGKARECKEQCERRRHGHELLQEDGDSFDSCVSKCRGHGGWWGKERWERCRQICRQSQEGEGGDEGDNTDDRCERMCQHYHDRREKKQCMKGCRYGESDLLSSDDGHEHGDRCQTQCKRLRPGSYDRQQCIEKCQCQQKEDEEVMNHHGGGGHGHGGSSCEQKCQQRYRHEYDKQQCVRDCKSGGGGGAGGRGREGDERQHGREMVIEAILEEV

SEQ ID NO: 374 - protein, 320 aa, Euonymus europaeus
MKYLWVFIVFSIAVLSHACSAQQCGRQAGNRRCANNLCCSQYGYCGRTNEYCCTSQGCQSQCRRCGVRTVGEIVVGDIGGIISKGMFNNILKHRDDDACEGKGFYTYEAFVAAARSFPAFGSTGDDATRKREIAAFLAQTSHETSAGWPSAPDGPYAWGYCFVRERNPPSKYCDTTTPCPKSYYGRGPIQLTWNYNYEQAGRAIGADLLNNPDLVATDAVISFKTAIWFWMTAQSSKPSCHDVITGSWRPSASDNSVCHVPDYAVVTNIISGEIEYGKSRNPQVEDRIEFFKRYCQILGVSPGKCYEERTFVSGLMMETI

SEQ ID NO: 375 - protein, 305 aa, Euonymus europaeus
MKYLWVFIVFSIAVLSLACSAQQCGRQAGNRRCPNNLCCSQFGYCGRTNEYCCTGFGCQSNCRRCGVRTVGEDVVGDIGGIISKGMFNNILKHRDDDACEGKGFYTYEAFVAAARSFPAFGSTGDDTTRKREIAAFLAQTSHETSGGRPSAPDGPYAWGYCFVKERNPPSKYCDTITPCPKSYYGRGPLQLTWNYNYAQAGRAIGVDLLNNPDLVATDAVTSFKTAIWFWMTAHSSKPSCHDVITGSWRPSASDNSVRHVPDYAVVTNIINGEIEYGKSRNPQVEDRIEFFKRYCQILGVSPGKF

SEQ ID NO: 376 - protein, 38 aa, Taraxacum officinale
VAKCTEESGGKYFVFCCYKPTRICYMNEQKCESTCIGK

SEQ ID NO: 377 - protein, 44 aa, Taraxacum officinale
GGKCTVDWGGQGGGRRLPSPLFCCYKPTRICYLNQETCETETCP

SEQ ID NO: 378 - protein, 42 aa, Taraxacum officinale
ANKCIIDCMKVKTTCGDECKGAGFKTGGCALPPDIMKCCHNC

SEQ ID NO: 379 - protein, 49 aa, Triticum kiharae
RTCQSQSHKFKGACFSDTNCDSVCRTENFPRGQCNQHHVERKCYCERDC

SEQ ID NO: 380 - protein, 47 aa, Echinochloa crus-galli
RECQSQSHRYKGACVHDTNCASVCQTEGFSGGKCVGFRGRCFCTKHC

SEQ ID NO: 381 - protein, 47 aa, Echinochloa crus-galli
RECQSQSHRYKGACVHDTNCASVCQTEGFSGGKCVGFRGRCFCTKAC

SEQ ID NO: 382 - protein, 30 aa, Amaranthus caudatus
AGECVQGRCPSGMCCSQFGYCGRGPKYCGR

SEQ ID NO: 383 - DNA, 3666 bp, Oryza sativa
  source 1..3666: mol_type = genomic DNA
atggaggccacggcagtgagcattggcaggtccgtgctgaagggagcgcttggctttgccaattccaccttggtggaggaggtttccctgcagctcggcgtccagcgcgaccaggcgttcatcagggacgagctggagatgatgaactccttcctgatggccgccaatgatgagaaagatgacaacaaggtggtaaggaccttggtgaagcaggtccgcgacgtggcctacgacgtcgaggactgcctccaggacttcgccgtccgcttggggaggaagagttcatcctggtggctcagccctcacacgctgtgggagcggcgccgcatcgccaagcagatggaggagctgaggggcaaggttgaggatgtgagccagaggaacatgcgttaccaactcatcaagggctccaagcctaccgtagctaccaatgtcgcacccagcagcactgcccgtgcgaccatgtctggcgcgcatgaagaacgatggcagcatgagaaggcaatagatcatctggttcggctggtcaaaaccaaagtcgatgaacgtagagtgatcgcggtgtggggaacaagtggtgatatcagggaaatgtccatcgttggaggggcctatgatcatctcaagagaagcaacaagtttgagtgctgtgcctgggtaaatttgatgcatccactgaacccaacaaagctcctgcaaaccattgttaggcaattctatgtaagatctcttcaggaggctggcaaagcaactccgtcgtgtcaaattctgagtagcatgttgataaaggaagatcagggtttggggtttagggttctgaggagcatgctgatgaaggaagatcatttgaatgatgagttcaataaatatttgagtgacaagtgctacctcattgtgcttaatgacctatcgtccgctgaagagtggaagcaaattaaaatgctcttcccagacaacaagaaaggaagccgaatcatagtgttcacacaacaagttgaagttgcaagcttttgcgctaggacagaggaggtggcacccgagcacatgcagttgtttgctgatcagactctttatgcttttcactgcaagggtgctaaagatggagtagattcaatggaggactcatctaacttaaacgaagacactacatacaacgctgtagaaggaaagagccttactcgcacatattcaatggtaactgctttcaaggaatctgagatcgttgggcgagttgatgaaataaaggagattattgaactgatttcaaaaggtagcaaccaacttgagaagatctcagtgtggggaatgggtggtattgggaaaaccactctaattcaaaatgtctaccgaagcgaaaaggttaagaagatgtttgataagcatgcatgtgtcacgatcatgcgcccgttcaatcttaatgatcttcttatgatcttagttaggcaactagaagattcaaaaacttctggaggaaaggagttggttagcattttacaaggaaagaaatacttgattgttcttgatgatgtattattcacaacagaatgggatgctatagaatcatatttcccagcaacggaaacaggaagccggatcataataaccacaaggcatgaaagtattgctaagcattgttcaggggatcaacaaggaaaaatgtatcaactcaatcgtctaggagacaacgatgcaaagaacctctttgcaaagaaggtatttaaggagtcagtaaatttggatcaacaagatcttgaattgatcaaagaagcgaaaccgattctaaagaagtgcaatggacttcccctcgcaattgtcaccataggtggtttcttggcaagcagccccaaaactgctttggagtggagaaaattgaatgagcatattagtgcagagttggagacaaacccagggcttgaggccatcagagctgtccttaatataagctacgatggattaccttatcacctcaagtcttgcttcttgtatctgtccatctttcctgaagatgacaagattagccgggaacgtttggtgcgccgatggtgtgcagagggttactcaagggagctatgggacaaatctgcagaggaaatagcaaacaactacttctttgaactcatagacagaagcatgatcctaccaactcaaaaattaacttacaacaatagacctgattcttgccaggtccacgatatcatgcgcgagatagccatctcgaagtcaaaggaggaaaatcttgttcttagactcgaagggggtcataggctacacaatcatggcatagttcgacatctttccattacaaacagcggcgaggatcgggagacagattttgctgaattggagacaacagtagacatgtcccgaataagatcattaacagtgtttggggagtggaagccatttttcatttctgacaagatgaggttgttgcgtgtgctcgacttggaagacacagaaggtgtacgtaatcaccatattaagcaaattgggaagctccttcaccttagatacctttctctaaaacgatgtagggagattgcttacctgcctgattccttaggtaacctaaggcaactggagatactagatatcagaggtacgctcatagtcaggctgccaaagaccatcatcaatcttcgcaagctaaagtatctccgtgctgttccaaacatagacgacatagcagagattctaattctaccagagctcatgaggaacaggctatgcatttctactgtttcgttgctggggctttgtctgctatgctcagcaagtgcgattggtaagtttgatgaagagactagtacccgtgacctctgcaccatgtggtgctgcagtattctccctagcattgctatgcgcctccaagggaatggtgtagtagcaccaagagggctgaggatcaggagactgacagccctgcacacgctaggtgtggtggacatttcatggcagccatcaattttacaagatatcaagaggctcatccagctgcgcaaattggaagtgaccggtgtcaacaagaaaaatagcaaaaagcttttctctgcccttgccgctctcagccaactagaatcattgtcactgttctcgaagtggaagccaggtctctggggctgtctggatgctgaagaaaagttttcgccacctaagaatctcaagactctgaagcttcaaggcaacctggttgagctgccaaaatggatcgggaagctcaacaatcttgttaagctgaagctatcaaaatccaggctcaaggatcatgatgctgctatacaagtccttggtatgctaccaaacctgaccatcctatgcctgccgcgcaagtcatttcactcgcttgagggtggtgaactcaatttctcggagggatctttcaaaagcctggtggttctcgagctccacttcggtgggagcaaacgcgtcaagtttcaacaaggagcattccacaatcttgagctactggagctttcaggttacattgataaagtcgaaactaagttctctgggctagaatttctcccaggaatcaaggaagtctggctccagggtgaattttattccagaaacgagcaagccgcacgaagattgaaagaggacttgctggcacagctttctgagaatccaaagaaaccaatcctgaagactagcgggtatttttag

SEQ ID NO: 384 - DNA, 9576 bp, Oryza sativa
  source 1..9576: mol_type = genomic DNA
ggaaatactagaatgacttacattgtaaaacagagaaagtatgattatctaaactctcagatagtctattgtaatcattgtatgcatgacatcagcttgtgtcaaagctgcagctttgttggatcaaccagaatttactagttctaaaaaaaacagaatttacttagatcctgctgaaagacttcgggccaattagaagcccagtatttggcccaaaactggtgtaaactacaggcccataatagaaataagttcactggaggtcccccaacttaacaccgagatttttttgaggtcccttaaccataaaccagaaatgcgtacccctaaactatgtaaaaccgtcaaaaaaaaaaaggtcccgaggcagtatagttgctcggtttcgctgacgtggcatcctagtcagcaaaaaaaattaaaataaatatgtggggcccacatgtaagtgagagaaaatggtgtgggccccacatttctcctttcttttctttttctcttctcttctctcccgattttctcgagtgggcgcggcggcagaggggagagaggtgaccggcggtggagcgggggtggtgggagaggggggctggcgcgacgtcggcggcgggagaaaaggagaggaggcggctggcgcgacggcgagctcggacggcaacggcgggaggaggaggaggagaggaggcagtcggcgctgtaaaacgcgcatgggatgcggcggatgatgtcgagcgggacggtgtcctcatcaccatcttcctcatcgtcatcgcagtctgcgggtgccgggcggagcggtttgggagggagggggaggcggccagcgagcccgttcgagctcgcccggcctgcgcgcgagctcgcccctcccatagcttggtgtgctggggacgacgacgaggaaagggggagaaaggaattgacggccgatgatagcaatggcgggcgagcgcggcgccgggctgctcatgctcgccgaccaggcccccggcttcgccgcactcgtccgccgtgctcgcccacgcactcgccgacctccgctccacccgccgctcctgcccgctgcccgctgcccgccggcctccctgactgaagaagagaagagagaaattaaagagaagagaaggagaagaaaagagaagagaagaaaaaaagatgtgtagctgacatgtgggccccatgtacttttttattttttttgctgactagaatgccacgtcagcgaaaccacccatatatactgtcataggaccttgagtgcatagtttgtgtgagtttagggatacacatttctcgttttgtagttaagggacctcgtaaaaatctcgctgttaagttgagagacccctccggtgaacttattcccccaaatattttctccatgctctgggctcaaacgcactcttggatgggccgtgtaatctacaccatttctggcccaatccaacgaaggtagctccagactcctaactccgccgccgcatgcccaatcctcgccggccgccgctgccatctcccttcccccaccgccaccgtcgccttctccgttcccccaacaaaggctcagtagcagcagccgcggcgcggagagcagaggccttggagggcctgcagaggagcgcccgcgtcgacgaagacgacatcagcaggcagtggacatggcgactgcgaatgctatcgccgacgtgggagcttcaggcgaggatgcgtggccttcatcagctgctgctcccttacctgctctggtttgtcattgtgttggttcgtggtttggggatatcaggatggggaaggggaatgggtttcgtgccatgttgttctattgtgcaatttgatgttctcttgtcgaatttcatggtgattcaatctgcatctgtgttattggttgtcaagcaaacattttatttctttcgagatgggtgtttcatctgaaattggtgtgtctgatgatgtgaccttgtgcaaatcattgtttcattttcttctattccacagagatttttttgtttagagtttattctaccatcttcttaccttttgaatgctatgcaccacagatttctgatttttacacattcaatcacagtgccgacccttggcgaatttaaaattttctcaccgtcaaaatttaatcaaacatctgatctaacagtagtagcgccagcacggctggtatttaaggcagaaagaaaggttgcgagggcgaggagttggtgatgatctgccggtcgtgtcgtgactttaggctataaaagatagctgtttggattaacccaaccaatgaagcgaatcatcgatggccgatagcgagattatatccaactaatgaagagaatcaactttaatcttttgtgagctacaagtttcgtggtgaaggcatatactaataccaccatcatggctgcagcgaatcaacgagatgcatttgtcttgcacatttcccaccggatactttgccatccatggctttatctcctccatgattgtatccccttcttcctcaacaaggaacgatcgatcattgtttgcttctttctctgacgacactttggtgcaagtgaaaggctctttcctggaactcgtcccgtgagctccttcctggctacatcctccttaattccttgccgatttccggcttcgtcttcactatcgtcagttcatttctcccgctctgcctgagagtccagtttcttggagatagtcgccggcttgctctctctctctctctcccttctcatcgccagctccagctcacaatccgagcttacgtggtggaatcgctatcgccacctctcggaagattattgtactttgccttgcctacttcttgagtccgatcaaacacatccatcatgcatctgtttgtacttgcattcagccaaacacttccagtttaactccgtccgcaagtcaatacttgcattcaatttccatttcctacaaaagcagctgctcagactcttgccttctccacccagcaatcgtgtttccttccctgtatcctgcgcgtgtgttcttagctgctctaggggatccttccaatggcggagctaatggccaccatggtggtcgggccactgctgtccatggtgaaggacaaggcctccagctacctcctggagcagtacaaggtgatggagggcatggaggagcagcacgagatcctcaaacgcaagctgccagccatcctcgacgtcatcgccgacgccgaggagcaggcggctaaacacagggaaggggtgaaagcatggctcgaggcgctccggaaggtggcctaccaggccaatgacgtcttcgacgagttcaagtacgaggcactccgccgcaaggccaaggggcactacaagatgctcagcagcatggttgtaatcaagctcattcctactcacaaccgtattctgttcagttataggatgggcaacaagctcaggatgattctgaatgccattgaagttctaattgaagagatgaatgcctttaggtttaaattccgaccagagccaccaatgtcgtccatgaaatggaggaagacagattctaaaatctccgacctttctttggacattgccaacaactcaagaaaggaagataaacaggagattgtcagcagattgcttgttccagccagcgaaggggatctcactgttcttcccattgtaggaatgggggggatgggcaagaccaccttagcgcagctcatttacaatgaccctgacattcagaagcatttccagttgctgctctgggtgtgtgtttccgacaacttcgatgtggatttgctggctaaaagcatagttgaagcagctcgcaaacagaagaatgataacagtggaagtactaacaagtcaccattggatgaacttaaagaagttgtgagtgggcagaggtacctcctcgttttggatgatgtctggaaccgtgatgctcgtaagtgggaagcgctcaagtcctaccttcagcacggtggcagcggtagctcagttttgacaacaactcgtgatcaagaagtggctcaagtgatggctccagctcaaaaaccttatgatctcaagagactgaaggaaagcttcatagaggaaattatcaggacaagtgctttcagttcacaacaagaaaggcctcctgagcttctcaaaatggttggtgatattgccaagaaatgttctggttcccctttagctgcaacagcattgggctctacactgcgtacgaagaccaccaagaaagaatgggaggctatattaagcagaagcacaatttgcgatgaggaaaatggaattttaccaatactcaagctcagttacaattgcttgccatcatatatgcggcaatgcttttccttttgtgcaattttccccaaggatcatgagattgacgtggaaatgctgatccagttatggatggccaatggttttatcccagagcaacaaggagagtgccctgaaatcattggtaaaagaattttcagtgagttggtgtcaaggtcattttttcaggatgcgaaagggatcccgtttgagttccatgatataaagaactctaagattacttgtaagatccatgaccttatgcatgatgttgcacaatcctccatgggaaaagaatgcgctgctatagatacagaagttagtaaaagtgaggattttccttattctgctcgccatctatttttgtcaggtgatagaccagaagctattcggactccttccccagagaaaggatatccaggtatccaaacattaatatgttcacgtttcaaatatttgcagaatgtatcaaaatacaggtcattgcgagtattaacaacgatgtgggaaggttcattcctgataccaaaatatcatcatcacctgaggtatcttgatctctcagaaagtgaaattaaagcacttcctgaagacataagcatcctatatcatttgcaaacattgaacctttcccgttgtttatctctccgtcgacttccaaagggaatgaagtacatgaccgccctccgtcacttgtacactcacggatgttggagtttaggaagcatgcctcctgacctcggacacctcacttgcctacagacgcttacatgctttgtagccggtacttgctctggctgcagtgatttgggagagctgcggcagttggaccttggtggtcgactagagctaagaaaactggaaaatgtgacaaaagctgatgcaaaagcagcaaatctcggaaagaaggaaaaactgaccaaattgaccttaatatggactgatcaggagtacaaggaggcacagagtaataatcataaagaggtgctggaaggtctcacgcctcacgaggggctcaaggttctgagtatatatcactgtgggagcagtacatgtccaacttggatgaataaactgcgggacatggtggggcttgagttaaatggttgcaaaaatctcgagaagcttcctccgttgtggcagctaccggctctacaagttctttgcctggaaggactgggtagtttaaattgcttgttcaactgtgacacacacacacccttcacattttgcagactgaaggagctaaccttgtctgatatgacaaattttgagacatggtgggacacaaatgaggtacaaggagaagagctgatgtttcctgaggttgaaaagctgtcaatcgaaagttgccataggctaactgccttgccaaaagcatcaaatgcgatttcagaatcgtccggcgaagttagcaccgtgtgtcgttctgcatttccagcattgaaggaaatgaaattatatgatttgcgtatctttcagaaatgggaggcagtcgatggaactccaagggaggaggcaacatttcctcagcttgacaaattagaaatcagacagtgcccagagctgactactctacctgaagcaccaaagctaagtgacttagagatatctaaaggcaatcaacaaatatccctacaggcagccagcagacatattacttcattgtccagtctcgttctgcatttgtccactgatgacacagaaacagcatcggtggccaagcaacaagattcgagtgatttggtgattgaggatgagaaatggagtcataaatctcccctggaacttatggtcttgagtcggtgcaaccttttattctctcacccaagtgcactggctctgtggacatgttttgctcagctcctagatctgaaaattcggtatgttgatgcgcttgtcagctggccagaagaggtgttccagggcttagtttccttgaggaagttagagatttctgtatgcgagaatctgacaggacacacacaagctcgtgggcaatctacacccgcaccaagtgaactcctgccacgtttggagtccctagagataacgtgttgtgattctattgtggaggtccccaatctaccggcgtctctcaagctattagaaattagggggtgccccggcctggagtccatcgtattcaatcagcagcaggataggacgatgttggtgagtgcagaaagctttgcagagcaggataagtcatcgttaatatcagggtccacaagcgagaccaacgatcacgtccttccacgcctagaatctcttgtaataaattggtgcgatcgtttggaggttctccatcttcctccgtccatcaagaaattgggtatttatagctgtgaaaaacttcggtccctctcagtaaagctggatgccgttcgagaattaagtatcagacattgcgggagcttgaaatcactggaatcttgcttaggagagctcgcgtcgctgcaacaactcaaactttttgattgcaagagcctggaatccttgccgaaggggcctcaagcatactcatctcttacatctcttgaaattcgtggttgttctggtataaaggtgcttccaccgagcctacagcaacgtctggatgacatcgaggacaaagaactagatgcctgctatgaaggtaatcttcagtttcttaaccgtgtaccatttagtggtaaaagtttcgagtttcgtgtctagaacccctagtcaaccattaatatgattatatgtacatagagtacaatgcgcattcataactcacttctgcagctgtgtcatctaaaccctttaaactttgagttgcatttgggtatctaatcgcatgcaaaggaatttagttatatctcccgtagccattccttatatgtgatgatctcttcctgtgattatgcttgctagtttggactatgtaattaattttgccgggtgactatgtaattacatgacttcatttagtcgccaggtgtggcatcatgcaattattatggcaaagctgtattagtcatgatcgaagccacttggtgaacttattccctgctactttgaaccaatactcattgattatttccctttaagcgtttgatatggacgacagtttaaatttgcagagctaactaacgcagcgcttgtctttacatttctctggaaactcacagctccattgcatatgtagtttgagtatacatagtttctttgaactgtcttatgcctttgaaaagcttgactatggaattctagtctatatattcaatacatatatttttttttcttttgtttgccagaggcagaagcagaaccaaagtctcgtcatcgtcaatctgcaatcagtaggctgatgtgcttgaagtagcagtttcaggaccagatgagagttgtcatcatggtttgtaacgcgtgcttgatgattgatttcgaatgaaattctagccactatccttatgcttactctctctatggtgtgacttccttgtaggatcgttaccgaatctgcaattgttgggttattaattgtgtggttgtatctcatggtagaatgtattacctacctaccctttctcaagataaactccagtaaagtcgatcgtctggttggtgtgagctgctacaagaaggatgaagccgatgatcccaaggccttgactttaagctagtcccaggttgtaagctgaagaacaacatactggagcttaaactgcttcactctttttttatccttttccttttcttgtgaactgtgatgtgtttgatctcgttcatgctccatcataagagaatcacagctagcacttccatttcaatgatgtttttcctaacatgacatgactgcagaggatacttgtgattgatcaacaacattttgcagcaacgttctctcccgataacgctgcaatggaattgatcaattggtgttcctacttattggaatgaatttcccattgtggaataaaatggaaagattggtacaatctgctgaaaaatgaactgtcgttactcaagttgaaacatgtgtcatgtgtgtaactatcagaattgttctcgacaaaatcgttgggacttgcaaggtaaaaaaaaaaaattcctcagctctgtaaatgctattgctgaactaaagttcagaaagctatagtgccgaaagatctcagatggcctactgcaacaaaattcagtacaaatgcaaaacaatgtaacattacgtggcccagcccatcatggtaagcccatactgtatgcgctgcaaactaatattagttcaggcaattactctgaaatttctgatagacgaacctgattttttcatgtcaggtgccgtgcttgttcagattcagcaacttacatttccaaagaagaaaaaggaaattcataccttctctttatttggtttttaaaagtggcctggattttcattatttggttaaaatttggcctttgtcgtaaggatttggatcctctatccaaacacatgccttccaagataaacgaatccctcattatacaaaaaaaaaagcacaagatgctcaacaagaagcttcaaattcgtgtaaatacatgtcatgtctcgctaccaaacaatatctcaacaatgacaacagattggaggtattcatctcacaatgatacatttcaacacaaatttatgtaggcctcgctgacaggacttggctggatggctgtcagttcagttcttgaaccaactgaagcatgagcagccctgcaaggaagcgataaactgaattaaaataggaatttgttacacaatacctgtaaagtggattacattaaaatattaccaaatcatactgtaagcaatcatacagtacaagattccttgcaaacaaccctaaccaaacttctagtaaaaccattattttttctgtagtaccaactttttgcaaccactatatactccagtaaaaaccagaagtattgttgcaatgactttgccgataaattatagaacgcggctactcgaagcagtagatttaagacaatttttactgcataataactacgcatggtgtcaagatccctaaaaattaacagaggcagacccagctcaagtattgacaaactcaagtggcaactggcatatgaacaattttctcgttcaaatatatctgaagcaatgtgtaaaacaaattagttttgctccacacatctgacaataatttttttcagtaagcagacttactgtggattcatatttgcgttgttgatagcgtttgatataatctgcctcgctagtcatgacgggagcgttgccggtacc

SEQ ID NO: 385 - DNA, 3720 bp, Arabidopsis thaliana
  source 1..3720: mol_type = genomic DNA
atggattcttcatgtttcttggtttatagaatattcagatttcgtaaaagaaataagaatatttcttcttctctatcttcttcatctcccccttcttctttgtctcaaaattggttgcaccctgttttcttgagcttccgtggggaagatgtccgcaaaggcttgctcagtcacattcagaaggagtttcaaagaaacggaatcacaccgttcattgataatgagatgaagagaggaggatccattggtcctgagctcttacaggctattagaggatctaagatcgcgatcatcttgctttcgaggaactatggttcttcgaagtggtgtcttgatgaattggtggagattatgaaatgcagagaagagttgggtcaaacagtgatgaccgttttttatgatgtggatccatctgatgtgaggaagcagaagggagattttgggaaggtttttaaaaaaacttgtgttggaagaccagaggagatggtacagagatggaagcaagctttgaccagcgctgcaaatatactcggggaggattctcgcaactgggaaaacgaagcggatatgatcattaaaatctcaaaagatgtctccgatgtgttgagttttacgccatcaaaggattttgatgagtttgttggcattgaagctcatacgacggagataacttcgttgttacaacttgatctggaagaagtgagaatgatagggatttggggtcctgctggtattggcaagacgaccatctccagagttctatataacaaactctttcatcagttccaactgggcgcaatcattgacaacatcaaagtacgttatccaagaccttgtcacgatgagtacagtgcaaagctgcagttacagaaagaattgttgtctcagatgattaaccagaaagatatggtggttcctcatttaggtgttgcccaagagaggttgaaggacaagaaagttcttctagttcttgatgacgtcgatgggttagtacaacttgatgccatggcgaaagatgtacaatggtttggccttggaagtcgcattattgtcgtaactcaagatctaaaacttttaaaagctcatgggatcaagtatatttacaaagttgattttccaacttctgatgaggctcttgaaatcttctgcatgtatgcttttggtgagaagtcccctaaagttggttttgagcagattgctcggacggttacaacacttgctggtaaactcccgttaggactaagggttatgggatcatatttacggcgaatgtcgaagcaggagtgggcgaaatcaataccaaggctaaggaccagccttgacgatgatattgagagcgttttgaagttcagttacaactccttagctgaacaagagaaagatttatttcttcacataacctgttttttcagaagggaaaggattgagacattggaagtatttcttgcaaagaagtctgtagatatgaggcaagggctccaaatcttggcagataaatctctcttatctttgaacttgggaaatatagagatgcataatttgctagtacaactaggcctagacattgttcgtaagcaatctattcataagcctgggaaacgtcagttcttggttgatactgaagatatttgtgaagtactcactgatgatacgggtaccagaactcttataggcatagatcttgagttatctggtgtaatcgagggcgtaataaatattagtgaaagagcctttgaaagaatgtgcaatctccagttcttaagattccaccatccatatggtgatcgttgtcacgacatattgtacttaccgcaaggtttgagccatatatctcgaaaacttagactacttcattgggaacgttatccactgacatgtttgcctcccaagtttaatccggagttccttgtcaaaataaacatgcgagacagcatgctcgagaagctgtgggacggaaatgaacccattagaaacctcaaatggatggatttgagtttttgtgtaaacctgaaggagcttcctgatttctctactgccactaatctccaagaattgagactcataaattgtttaagcttggtggagcttccctcttccattgggaatgccactaatttactggaattggatcttattgattgctcaagtctggtgaaactcccctcctctattgggaatctcacaaatctaaaaaagttgtttctcaatagatgttcgagtttggtgaaactcccttcctcttttgggaatgtcactagtctcaaggagttaaatctcagtggttgttcaagtcttctggagatcccctcttccatcgggaatattgttaacctcaagaaagtatatgctgatggatgttcaagtctggtgcaactcccttcctctattggaaataacactaatctcaaggaattgcatctactgaattgctcgagtttgatggaatgcccttcttctatgttaaatttaactcgtctcgaagatttgaatctcagtggatgcttaagtctggtgaagctcccctctattgggaatgttattaatctccaatcattgtatctcagtgattgctcaagtctaatggaactccccttcactattgagaatgccactaatctcgatacattgtatcttgatggatgctcgaatctactggagcttccctcatctatttggaatatcactaatctccaatcattgtatctaaacggatgctcaagtctaaaggagctcccttccttggttgagaatgccattaatcttcaaagtttgtctcttatgaaatgttcaagtttggtagagctcccttcctccatctggagaatcagtaatctctcatacttagatgtcagtaactgctctagtttgctagagctcaatcttgtctcgcaccccgtggttccagattccctaatcctagatgcaggagattgtgagtctctggtgcagagactagattgcttctttcaaaatccaaagattgttctcaacttcgctaactgcttcaaactgaatcaagaagcaagagatctcatcatccagacatcggcttgtagaaatgcgatattaccaggtgaaaaagtgcctgcatacttcacgtaccgcgctactggtgattctttaacagtgaagttgaaccagaagtatcttcttcaatctttgagatttaaagcttgccttttgctagttgagggtcaaaacaaatggccaaattgggggatgaatctagtaacttctcgagaaccagatggacacattgttctgtacacaccaagcagccatcttcaaggtccacttttaatggagaatctgtatacattcgaatttgaactagtggtgacttccagtgagttcgttttggagttcagagctgatcgttacaagtgtgcggtaagcgaatgcggcctaatccaactcttttaaatccctttatgtccatgagcttcagaggtcagtggaggctgttattttgcagtctttgagatttgagacaaacactagactgaagttagggcatgacaagagctgaaatacattaatgctatatgatgaaacattttcttttaaagttgggtcgatttgacaagtttggtgtgcatgttgtgtggtgtcacttagtatgattatcattactatatatgtgatgttggtaatatgtataatttatcaattaagtcacagtatacatctatgtgtttatatgtagatattacagcgaag

SEQ ID NO: 386 - DNA, 2845 bp, Arabidopsis thaliana
  source 1..2845: mol_type = genomic DNA
caaagacttttgaatgtctcccaccaaattctgatgaatgaatatgtggatgtggtatttcatggaccagcacaaaagagcatttcaagaagtcgtttggtagctgtaccatctaattatgttcacatgatgctgagagttgaataattcagaaagggacaaagagtgttatgattgcgttgacttggagtcatgtttcatgaaggtagtgcgtagttgactcttttctagtgtaggaggtagagatttgggagagtcactagaacacgaaatggcagaggctattgtttctgttacagtgcagaagctaggacagttgctcttggaagaaccgttgttcttatttggtataggtgaccaagtgaagcagctgcaagacgaattgaagcgtttgaattgctttttgaaagatgcagatgagaagcagcatgaaagcgagagagtgcgtaactgggttgcaggcattagagaagcttcttatgatgcagaggatatcctcgaggcatttttcctcaaagcagaatcaaggaaacaaaaagggatgaaaagggtgcttaggaggcttgcttgcatcttgaacgaagcggtttcacttcatagtgttggctcagagattagagagatcacctccaggctttctaagatagcagcaagcatgctagattttggtataaaagaatctatgggcagagaaggtttgagtttgtctgatagtctaagagaacagaggcaatcgtttccatatgttgttgagcataatcttgttgggttagagcagagtctagagaagttggtgaatgatttagtttccggaggtgagaaactaagagtcacgtccatctgcggaatgggtggtttggggaaaacaactttagccaaacagattttccatcaccataaagtgaggcgtcatttcgatagatttgcttgggtatatgtttctcaagactgtagacggagacatgtttggcaagacatttttctgaatctcagctacaaggatgaaaatcagagaatactcagcttgagggatgaacaacttggagaggagttgcatcggttcttgaaaaggaataaatgcctcattgtgcttgatgatatctggggcaaagatgcttgggattgtctgaaacacgtctttccacatgaaacaggaagcgaaataatcctcactactcggaacaaggaagtcgctttatatgctgatcccaggggtgtgcttcatgagccacaattgctaacatgtgaagagagttgggagctgttggagaaaatttcattatctggaagagaaaatatagagccaatgttggtcaagaaaatggaggagattgggaagcagatagttgtaaggtgtggaggtttacctctagctataacagttcttggaggacttctggcaacgaaaagtacatggaacgagtggcaaagagtatgcgagaacatcaaatcatatgtttcaaatggaggtagtagcaatggaagtaagaacatgctagttgcagatgttttgtgcttgagttacgagtacttgcctccccatgtaaagcaatgtttcctctactttgctcattatcctgaagactatgaggttcatgtgggaacactagttagttattgcatcgcagagggaatggttatgcctgtaaaacacacagaggctggcacgacagtggaagatgtcgggcaagattatcttgaggaattagtaaagagaagcatggttatggttgggaggagggacattgtaacttcggaagtcatgacatgccgtatgcatgacctcatgagggaggtgtgtttacagaaggcaaagcaagaaagctttgtgcaagttattgattcaagggatcaagatgaagctgaggcttttatatctctttcgaccaatacatctcgtagaatttctgtccaactacatggtggagcagaggagcaccatatcaagagtctgtcgcaggtttccttcagaaagatgaaacttcttcgagttctagatcttgagggagctcaaatcgagggagggaagttgccagacgatgtaggagatctcatccatttgaggaacctgagcgtgagattgacaaacgtgaaggaacttacatcatctattggaaacttaaagttgatgattactctagacttgttcgtgaaagggcaactgtatattccaaaccaactctgggattttcctgttggaaagtgcaatccaagggatcttttagcaatgacaagtcttagaagattgtctatcaatctttcttcgcagaacacagacttcgtggtggtgtcttcactaagtaaagtcttgaaacgtctccgtggcttgacaataaacgttccatgcgaacctatgcttccaccagtagatgtaacacagttggtctctgcatttactaatctctgtgaactggaactgttccttaaactagaaaaactcccaggagaacagagtttctcctctgatcttggtgctctacgtttgtggcaatgcggattagtggatgacccgtttatggttctcgagaagcttccaaacttgaagattctccaactgtttgaaggatcatttgtaggtagtaagctttgttgttccaagaatctagagaatctagaggagtggactgtagaagacggtgccatgatgcgtcttgtcaccgtggagctaaagtgttgtaacaaactgaagtcagttcctgaaggaacgagattcctaaaaaatctacaagaagtagagattgggaacaggacaaaggcatttaaggacaagctaatctctggtggtgaagatttctacaaggttcaacatgtgccttgtgttgtttttgagaactgtgaactttaa

SEQ ID NO: 387 - DNA, 3152 bp, Arabidopsis thaliana
  source 1..3152: mol_type = genomic DNA
agcttttttgtttgtctattagagattagtcaacgtagtgatgacatactgacatctttggattgtttcaaagtttacgtttttactatacattgactagtcttagagattttatattatgcatatagtgacatagacttttcctttcttatctattcctcttctctacctaatctgtgaatctctctctctcactctctctcttttccttgattgtgcagagatgggaggttgtttctctgtttcattgccatgtgatcaagtagtgagtcagttctctcagttgttatgtgtcaggggaagttatattcacaatctctccaagaatctggcttctctgcagaaggccatgcgaatgctcaaggctcggcaatatgatgtgataagaaggttggaaacagaagagtttacagggcgtcaacaaaggctttcccaagttcaggtatggcttactagtgtcctaatcattcaaaaccagtttaatgatctgcttcgtagtaatgaagttgagcttcaaaggttgtgtctttgtggtttctgctccaaagatttgaaattgagctatcgttatgggaaaagagttatcatgatgttgaaggaagttgagagtctcagttctcaaggattctttgatgtggtttctgaggcaactccgtttgctgatgtggatgagatcccttttcaacccacaattgttggtcaggagataatgcttgaaaaggcatggaaccgtctcatggaagatggatccgggattttgggtctgtacggtatggggggagtaggcaaaacgacactactcacgaagatcaacaataagttttctaaaatagatgacagatttgatgttgtgatatgggttgttgtgtctagaagttcaacagtccgtaagatacaaagagacatagcagaaaaggtaggccttgggggaatggagtggagcgagaaaaacgataaccagatagccgttgacatccacaatgtccttaggagacgaaagtttgttttattgttggatgacatatgggagaaagtgaatttaaaagcggttggagtcccgtatccaagcaaagataacggatgcaaggtagcattcactactcgttctcgagatgtgtgtgggcgcatgggggttgatgatccgatggaagttagctgtctacaacccgaagaatcttgggatttgtttcaaatgaaggttgggaaaaatacactgggaagtcacccagacattcccggacttgctagaaaagtcgctaggaaatgtcgtggcctaccattagcactcaatgttatcggtgaagctatggcatgcaaaagaacagtacatgaatggtgtcatgccattgacgttttaacatcatctgccatagatttttcaggtatggaagatgaaattctccatgttttgaagtatagctatgataatttaaatggggagctgatgaaatcctgcttcctctattgctctctgtttcctgaagactatcttattgataaagaggggttggtagactactggataagtgagggattcataaatgaaaaagaaggcagagagaggaatattaaccaaggttatgagataattggtacccttgtccgtgcatgtttgttgttggaggaagaaaggaacaaatcaaacgtgaaaatgcatgatgtggttcgtgagatggctctatggatatcatccgatcttgggaagcaaaaggagaaatgtattgtgcgagctggtgttgggttacgtgaagtaccaaaagtcaaggattggaacactgtgagaaagatttctttgatgaataatgagattgaagagatatttgacagtcacgagtgtgctgcacttacaactctatttctccaaaagaacgacgtggtaaagatctcggctgaattctttcgatgtatgcctcatctggtggttttagatctatcagagaatcagagtcttaatgaattaccagaagaaatatcagagctggcctctttgagatatttcaacttgtcatatacatgtatacatcaactacccgttggtttatggacattgaaaaagctaatacatctgaatctcgaacacatgagcagtcttgggagtatattagggatatcaaatttgtggaatttgaggacattgggactacgagattccagactgttgctagatatgagtttagtgaaggagctgcagctcttagaacatctagaagttataaccctagatatatcatcaagtttggttgcagagccattgttatgctctcaaaggttggtggaatgtataaaagaggtagattttaagtaccttaaggaagaatcagtgagagtattgactttgccaaccatgggtaatctccgcaagctcgggataaaaagatgtggaatgagggagataaagatagagaggacaacttcatcatcgtctcggaacaaaagtcccacaactccatgcttctcaaacctctccagagtctttatagctaaatgccatggtcttaaggatttgacgtggcttttgtttgctcctaatcttacttttcttgaagttgggttctcaaaggaagtagaggatataattagtgaagagaaagctgaggagcattcagctacgattgttccttttaggaaattggagacactacacctgtttgaattacgcgggctcaagagaatctatgcaaaggctctgcattttccgtgtctgaaagttatccacgtagaaaaatgtgaaaagctgagaaagcttccattggattctaaaagtgggatcgcgggtgaagaacttgtcatatattatggagagagagaatggatagaaagggttgaatgggaggaccaagcaactcaactccgtttcttaccttcatccaggtggcggtggagagaaacataatgaacttcactttcttctacaaacttttgttgtcatggtctaaagacatttgccggtgtgtaaatctcttccttgtctcttcttgtttgcataaccgttctcatcgttcttttggttagtgatcattggatttgtacttatctctttctctaaacgatgagtgtttgtttcggcttcatagaaacattacacagagactcatgagaaaatgaataaaaacttgcaagttcctaaccattgtaataaaataataattaac

SEQ ID NO: 388 - DNA, 1159 bp, Arabidopsis thaliana
  source 1..1159: mol_type = genomic DNA
gtttggtttaggcatctgaaatctaccgaaatgggccggtaattagctcatacccaacacgaccagaccagaccgacccgacccgacggctccagattcatccatgtttcatcttcctcatcagatctaattcaatctgcgaatttctcttaaaccctaaccctctcgctgccgtccggtggtttttccgacgacgaactatgacgattcacgctgcagtaatccagaagcttctgaacaccggagcacatctcggccgtcgtgccgccgagcaccatttcaagcaatacgcttacgggacgcgtaacggaatgacaattatcgactccgacaaaaccctaatttgcctccgtagcgccgctcatttcgtcgctaacctcgcccacatgagaggtaacatcttcttcgtcaacacgaatcctctcttcgacgaaatcattgagctcacttctcgtcggatccaaggagattcgtataatcacaaccgtgcgatgaatctgtggaagatgggagggtttttgactaacagctacagtcctaagaagtttcgatctaggcataaaaagctttgctttggtccaactactatgcctgattgtgtcgttgtgtttgattctgagaggaagagctctgtgatacttgaggcatcgaagcttcagattccggttgttgcaattgtggacccgaatgtgccattggagttctttgagaagattacgtatcctgtgccagctcgtgattcggtcaagtttgtgtatttgttctgtaatgtgatcaccaagtgctttgtggcagaacagatgaagttggggatcaaagaagggagcaatgaagatttgatgaaggatttagctgcttgattttgatatttgcaacaaaagtatgaaactttacagttgtttttctgagtctggaataattgttcttcagaattgtggttacttcaactttgaaattctgggagttttttacacatggatgattttgtttctctgatggatatttctgtataagattgttgagttctagtgttctacatcttgataactgccttgtcttttccttgcacaactcattttttggaaatgctttagacattgtatatggtaatcgttacttcacaagttttggaatgagctatttacaagtaactgtctgg

SEQ ID NO: 389 - DNA, 3126 bp, Arabidopsis thaliana
  source 1..3126: mol_type = genomic DNA
caatgataagattctaaagtagattgagacaagtttcgtagtcggcagcagtaaccaagaaaacgagtaaggttgactcttgacttgttaaaccattgacttcaatttcgataaagtctctatgtaagctcatttttctgaaacaagttttgctaaaaaaatccaaagatctgaagcttcagatccttctcggctaaggctaagtcacaaccttgtaagtttactttactttggttagatttgtttcaatgttctaggattctacatgtttcttgagaagatatggattagttaaagaataatccaatcttttggttattgagattctatagtcgttggttgattgatttttggaaagttcaatctagtgatgatacacataaccgattgaattattgcttggttatagtttaccaattagagatatttcttgaagttgcagggtctgagtaaatggtggacgctgttgtaacagtgtttttagagaaaaccttgaacatcctcgaagaaaaaggccgaaccgtatcggactaccgaaaacagttggaagatttgcaaagcgaattgaaatatatgcagtcttttctcaaggatgcagagaggcagaagagaactaatgaaacgttgcgtactcttgttgcggatttacgagaactggtttacgaagctgaggatatacttgtggattgtcagctcgcggatggtgatgatgggaacgagcaaaggtcatcaaatgcgtggctttcgcggcttcatcctgcccgggttccgttgcagtacaagaaaagcaaacgtttgcaagagatcaatgagaggataacgaaaataaagagtcaagtagagccttatttcgaattcataacgccgagtaatgttggaagagataatggaactgatcggtggagctctccggtgtatgatcatactcaggtggttggtttggaaggagataaaagaaaaatcaaggagtggctctttcgatcaaacgacagccagcttttgataatggcctttgttgggatgggagggctaggtaaaactacaatcgctcaagaagtgttcaatgacaaagagatcgaacatcgtttcgaaagaaggatatgggtgtctgtgtcccagacttttactgaagaacagatcatgagaagcatattgaggaacttgggggacgcgagtgttggagatgatattggaacattgctgagaaaaatccagcagtatcttttggggaaaaggtacttgatagttatggacgatgtatgggacaagaatttgagctggtgggacaagatctaccaaggactgcctagaggacaaggaggtagcgttatcgtgaccacaaggtcggaatctgtagcgaaaagggtgcaagcgagagacgacaagactcaccgtccagagctccttagtcctgataacagttggctgctgttttgtaatgtggcatttgcagcaaatgacggtacttgtgagcgtcccgagctagaggatgttggcaaggagattgtaacgaaatgcaaaggtttgcctttgacaatcaaagcggttggtgggttacttctgtgcaaagaccatgtctatcatgaatggagacgaattgcagagcattttcaggatgagctaagaggaaacacttctgaaactgacaatgttatgtcttctctgcagttgagctacgatgaactcccttcccaccttaagtcgtgcattctcacgctttcgctctatccagaagactgtgttataccaaaacaacaactagtacatggatggatcggagaaggttttgtcatgtggagaaacggaagatctgcaactgaatctggagaagactgcttttccgggctcacaaacaggtgtctaatagaagttgtagacaaaacctatagcggaaccatcatcacttgcaagattcatgacatggttcgtgatttggtgatcgatatagccaagaaggattcgttctctaacccggaaggcctcaactgtcgtcaccttgggattagtggaaactttgatgagaagcagatcaaagttaaccataagctgagaggcgtagtgtcaacaactaagacaggtgaagtgaacaagctcaactcagacttagctaagaaattcacagactgcaaatatcttcgggttctcgatatctcgaaatccatatttgatgctcctctgtctgagattttggatgagattgcaagccttcaacacttagcatgtcttagtttgagcaacacacatccgttgatccagtttcctcgttccatggaagatctccacaaccttcagattctagacgcaagctactgtcagaatctgaaacaacttcaaccttgcatcgtcttgttcaagaaactccttgtacttgacatgacgaactgtggatcccttgaatgcttccccaagggtatcggaagtctcgtgaagctcgaagttctgttgggatttaagccagccaggtccaacaatgggtgcaagctcagtgaagtgaaaaatctcacaaaccttcggaaacttggtctttctctgactcgtggcgatcagatagaagaggaggagcttgattctttgataaacctaagcaagctgatgtccatttcgatcaactgctatgatagctacggcgatgatctcataaccaaaatagacgcccttactcctccacaccagctccatgagctttctctacaattctatcctggaaagtcgagtccatcgtggttgagtcctcacaagcttccgatgttgaggtacatgtcaatatgttcaggtaatttggtgaaaatgcaggaaccattctggggaaacgagaatactcactggagaattgaaggtttaatgttaagttcattgtcggacctagacatggactgggaagtgctgcaacagtcaatgccgtacctgaggaccgtgaccgcaaactggtgtccagagctagagtctttcgcgattgaagatgttggctttagaggcggagtgtggatgaaaacaccattgcacagaacctgatgaaacgttttaagcaactagatcaatgtttattaaacagtgacaataagttggtgtattacatataccttgatacaatgtaatgttgctttgaccgtttggatttcatatcgc

SEQ ID NO: 390 - DNA, 1170 bp, Arabidopsis thaliana
  source 1..1170: mol_type = genomic DNA
gaaaacggcccatataaatccaccaaacgaatcttctctcttggtataaatatgctgtcttgcgttacagagaaaccctagacgtcgaagatgaagttcaacgttgcgaatccaactactggatgccagaagaagctcgagatcgacgatgaccagaaactacgtgcgttttacgacaagagaatctctcaagaagtcagtggagatgctttgggcgaggagttcaaaggatacgttttcaagatcaagggtggttgcgataagcaaggtttcccaatgaagcagggagttttgactccaggccgtgttcgccttttgcttcaccgaggaactccttgcttcagaggacatggaaggagaactggtgagaggagaagaaagtctgttcgtggttgcattgtgagccctgatctctctgttctgaaccttgtcattgtgaagaagggtgagaacgatcttcctgggcttaccgatactgagaagccaagaatgagaggaccaaagagagcctccaagatccgtaaactgtttaacctcaagaaggaagatgatgtcaggacctatgtcaacacttaccgccgcaagttcacaaacaagaagggcaaggaagttagcaaagcccctaagatccagaggcttgtgaccccattgactcttcagaggaagagagctagaattgctgacaagaagaagaaaattgctaaggctaattctgatgctgctgattaccagaagcttctcgcctcgaggttgaaggaacagcgtgacaggaggagtgagagtttggcaaagaagaggtcgagactctcttctgctgctgccaagccctctgtcacagcttaaaaaagcttgagaatcaaatcaaagatgtcacctttctagttttgttctcttttcttctccggctattaaaaagttagttcgagttcatattcagctgtttttgttccaagacatgggtacacaatcgctttgggcttgtttcatgatttatgcttttagttgaagaccattttaaactcaatttttattgcttatctttctcagtttttgatcaaagcgtttctccattgaaaaccattttaatcacctgtttcaatcatacataatgttaaacacatgtactggcgattacaataggtatatattttgactgaaatttatggagca

SEQ ID NO: 391 - DNA, 3147 bp, Arabidopsis thaliana
  source 1..3147: mol_type = genomic DNA
aatggagttgccatggaggttgaggtaatttgtagctcgaatgcatctgatcatgcagttagtatagataatctgtggatattttgcaatattcgtagggaaaaggaaccaaaaatccatcaagttgtaagtgtttagcaaatatctacaagacttcatcttttgtgctttctcttaaatgtatccgatttttttttgcatttgaaagttctacaatattattagagtagtgggaaatgtcataatcgtggaaaagtataaatattttcaataatgcatacagtaatcattgattccctttgtgtggttgaaattctattctatacatctttaaattcgatatagtaatcatttattccctatctcttcttttcatcattttgaataattgtcactcactcaatttggtttcttgttttgctctctagatctctcttttctctcttctttccatctccagcaatgggagcttgtttaacactctcgttctcttgtgatgaagttgtgaatcaaatctctcaaggtttatgcatcaacgtgggttatatttgcgagctctccaagaatgtagtggctatgaagaaagacatggaagtgctgaagaaaaagcgagatgatgtgaaaagaagggtagatatagaagagttcacaaggcgtcgtgaaaggctttctcaagtccaaggatggcttacgaatgtctcgaccgtcgagaataaattcaatgaactgcttaccactaatgacgctgagcttcaaaggttgtgtctctttggattttgctctaaaaatgtgaaaatgagctatctttatgggaaaagggttgtcctgatgttgaaggagattgagagtcttagttctcaaggagattttgatactgtgactttagccactccaatagctaggattgaagagatgcctattcaacctacaatcgtaggtcaggaaacaatgctcgaaagggtatggacccgtctcacagaagacggagacgagattgtgggtctttatggcatgggtggagtaggcaaaaccacccttctcacacgaatcaacaacaagttttctgaaaaatgtagcgggtttggggttgtgatatgggtggtggtgtctaagagtccagatatccataggattcaaggagacatcgggaagagactagaccttggaggcgaagagtgggataatgtaaatgaaaaccagagagcccttgacatatacaatgtccttgggaaacaaaaatttgtgttgttgttggatgatatatgggagaaagtgaatttagaagtgcttggagtcccttatccaagcagacaaaatggatgcaaagtagtattcaccactcgttctagagatgtttgtgggcgtatgcgggttgatgacccgatggaagtcagttgcctagaacccaacgaagcctgggaattgttccaaatgaaagttggagaaaacacattgaaaggccatccagacattcctgaacttgcaagaaaagttgctggaaaatgttgtggcctaccattggcacttaatgtcattggcgagaccatggcatgcaaaaggatggtacaagaatggcgtaacgcaattgacgttttgagctcatatgctgcagaattccctggtatggaacaaattcttcctattctaaagtatagctatgataatttaaacaaggagcaggtgaaaccatgtttcctatattgctctctgtttcctgaagattatcgtatggaaaaagagaggttgatagactattggatatgtgagggattcatagatgaaaatgaaagtagagaaagagcattaagccaaggttatgagatcattggtatccttgtccgagcatgtttgttgttggaggaagctatcaataaagaacaagttaaaatgcatgatgtggttcgggagatggctctatggattgcatctgatcttggggaacataaagaaagatgtattgtgcaagtcggtgttggattacgtgaggtaccgaaagtcaagaactggagttctgtgagaaggatgtcgctgatggaaaatgagattgaaattttatctggcagtcccgaatgcctggaacttacaactctgttccttcagaaaaatgattcattgctacatatctcggatgaattcttccggtgtatcccaatgctagttgttttggatctatcagggaattcaagtctccggaaattgcctaaccaaatatcaaagttagtctccttgcgttatcttgacttgtcgtggacatacattaagcggctacctgtcggtctacaagagttgaaaaagctcagatatttgagattggattacatgaagagacttaagagtatttcagggatatcaaatatatcaagtttgaggaaattgcaacttttacagtctaaaatgtcgctagacatgagcttagtggaggagttgcagctattagaacatttagaagttctaaacataagtatcaagtcaagcttggtagtggagaagttgttaaatgctcccaggttggtgaaatgtcttcaaatcttagtacttagaggagttcaggaagaatcatccggagtattgactttgccagatatggataatctcaataaagtcatcataaggaagtgtggaatgtgtgagataaagatagagaggaaaactttatcattatcatcgaacagaagtcccaaaactcaattcctccataacctctccactgtgcatataagtagctgtgatggtctgaaggatttgacgtggttgttgttcgctcctaacctcactagtctcgaggttctggactcggaactagtagaaggaataataaaccaagagaaagctatgactatgagtggtatcattcctttccagaaactagagagtctacgcctacacaatctagcgatgttgaggagcatctactggcaacctctgtcttttccatgtctgaagacaattcacataacgaagtgtcctgagctgagaaagcttccattggattctgaaattgccataagggatgaagaacttgtcattaagtaccaagaggaagaatggcttgaaagggttgaatgggacaacgaagccacaagactccgtttcttaccttttttcaagttctttggacctgaatggcaagttagttatgtgcggtag

SEQ ID NO: 392 - DNA, 3034 bp, Arabidopsis thaliana
  source 1..3034: mol_type = genomic DNA
caaaaaaacaaagaaggattataagctatacttacttttcagcttctctcatggaagaatcttcatctttgtcattgcagtcttgcaattggagacaccatgtgtttccaagcttcagcggcaaagatgtccgcagaacctttctcagccaccttctcaaggagttccggcgtaagggaatccgtactttcatagataatgatatcaagagaagccaaatgatcagttctgagcttgtacgagctatcagagaatctaggattgcggttgtagtgttgtcgcggacctatgcatcttcaagctggtgtttgaatgagttggtggagataaagaaagtaagccagatgatcatgccggttttctacgaggtggatccatctgatgtgaggaaacgaacgggagaatttggaaaggcgtttgaggaagcatgtgaaagacaaccagatgaggaagtgaagcagaaatggagagaagcattggtctatatagctaatatagccggcgagtcttctcaaaactgggacaatgaagcagatctgattgacaagattgctatgagcatttcatatgaattgaattctacattatcacgagattcctacaatctggttggaatcgacaatcatatgagagagctggattctttgttatgtctggaatcaactgaagtgaaaatggtggggatttggggtcctgcaggtattggcaagacaacaattgccagagctttattcaaccggctatctgaaaacttccaacacactatttttatggagaatgttaagggaagttctaggacctcggagctcgatgcctatggcttccagttgcgtttgcaagaacagtttctgtctgaagttattgatcataagcatatgaagatacatgatttaggtttggtaaaagaaagattgcaggatctgaaagttcttgttgttcttgatgatgttgataaactagaacaacttgatgccttagtgaaacaatctcagtggtttggttctggaagtaggatcattgtgaccacggaaaacaaacagctattgagagcgcatgggatcacttgcatatatgagttgggttttccatctagaagtgattctcttcagattttctgccaatatgcatttggagagagttctgcaccagatggttgtatcgagcttgctactgaaataacaaagcttgctggctatcttcccctagctctaaaggttttggggtcctctctgcgagggatgagcaaagatgagcaaaaatcagcattgcctcgactcagaaccagtcttaatgaggatattagaaatgttttacgagtcggttatgatggtatacatgacaaggataaggtcatattccttcatattgcttgtttattcaatggtgagaacgttgattatgtgaagcaaatacttgcaagttctggcttggatgtcacatttgggcttcaagtccttaccagtaggtctctcatacacatatcgagatgcaatcgtactattacgatgcacaatttgctagaacaattgggtcgagaaattgtttgcgaacaatctattgccgagcctggcaaacgtcaattcttgatggatgcttcagagatttatgatgtacttgctgataacactggtactggagctgttttgggcatatctttggacatatctaagatcaatgagttgtttctgaatgaaagagcttttggtgggatgcataatctgttgtttctaagattctacaagtcctcttcgagtaaagatcaacctgagcttcatttacctcgaggcttggattatttaccccgtaaacttaggctgctgcattgggatgcattccccatgacatcaatgcctctgagtttttgtccacagtttcttgttgtgataaacataagggagagccagcttgagaagctgtgggaaggaacacaacctcttagaagtctaaagcagatggatttaagtaagtctgagaatctaaaagagattcctgatctttcgaaagcggtaaatatcgaggaactctgtctcagttattgtggaagtttggtgatgttaccttcctcgatcaagaacctcaacaaattggttgttcttgacatgaagtattgctcaaagctagagattatcccctgcaatatggacttagagtcccttagcatcctcaatcttgatggatgctcacgattggagagttttccagaaatttcttcgaagattggatttctctctctgtcagaaactgcaatagaagaaattcccacaacagtcgcgtcttggccatgtctggcagcattggacatgtcaggctgcaagaacctcaagacgtttccatgtcttccaaaaactatagaatggttggatttgagcaggacagagatcgaagaagttcctttgtggatcgataaactctcaaagctcaataaactattgatgaacagctgcatgaagctaagaagcatctcttctgggatctctacgctggaacatatcaaaacactagattttttggggtgcaagaatattgtgagctttcctgtagagatattcgagagctctcggttctgtcataatctggtgatggagatgagaaacattcaaaaccctgatcttcctcgaccattttatttcaagaacaactatattgacactattccagattgtattacacgtcactgcaagctgccttttctgaattcatcaggatcaatctccagcaagatagagaatgatttcatctggttcgataaataaatatcagtgaagaattgcatgataatgatgagtcagatggagtttcatcttcaaaccctgctcattacaattgtaagtgacatcatttgacttttcccctgtggacccatctttgggcactgcaagtgttccagaccatatagttcaacatctctgaaactgagaatgaaatccgtgtacgttgggcacgttattattgttgaaatgtaggttcttgtaagatatagcttatagacaattgtttgtatatccgtgtacgttgggcacgttattattgttga

SEQ ID NO: 393 - DNA, 3099 bp, Capsicum chacoense
  source 1..3099: mol_type = genomic DNA
caaatatttcttggagtgaatttgaagttgtattatctgcaattgaatggttggtcatagtcgcaaaggacaaaaacgagaatacagtatatatggctcatgcaagtgtggcttctcttatgagaacaatagaatctctcttgacattcaattcgccgatgcaatctctatcctgtgatcacagagaagaactttgcgctcttcgtgaaaaagttagttccctggaagtatttgtcaagaactttgagaaaaacaatgtttttggggaaatgacggattttgaagtagaggtaagagaagttgcaagtgctgctgaatacacaattcaactgagactaacaggaactgtactgggagaaaataaaagccagaaaaaaaaggcgcgtcgaaggtttcgtcaaagcctgcaacaagtagcagaggacatggatcatatctggaaagagtcgacaaagatccaagataaaggaaaacaagtatcaaaggaatcattggttcatgatttttcaagttcaacaaacgatattttgaaggttaagaacaatatggttggacgtgatgatcaaaggaaacagttgttagaagatctgactagaagctactctggggaacccaaagtcatcccgattgtcgggatgggaggcataggtaaaacaaccttagcaaaagaagtttacaatgatgaatcaattctatgccgttttgatgttcatgcctgggctaccatatctcaacagcacaacaaaaaggaaattttgctgggccttctgcattccacaatcaaaatggatgacagggttaagatgattggtgaagcagagctagcagacatgttacagaaaagtttaaagagaaagaggtacttaattgtcttggatgatatctggagttgtgaagtgtgggatggcgtgagacgatgctttccaactgaagacaatgcagggagtcgaatactgttgactacccgtaatgatgaagtagcttgttatgctggtgtagagaatttttctttgcggatgagcttcatggatcaagatgagagttggagtcttttcaaaagtgcagcattttcaagtgaagcattaccatatgagttcgagactgttggaaagcaaatcgcagatgaatgtcacgggttaccactaactattgtcgtggttgcagggcttctcaaatctaaaaggacaatagaagattggaaaactgttgctaaagatgtcaagtcattcgtcacaaatgatcctgatgaacgatgttcacgtgtgcttgggttgagttacgatcacttgacaagcgatctaaaaacatgtcttctgcatttcggaatttttccagaagacagtgatattccagtgaagaatttgatgagatcatggatggctgaggggttcctgaagttggaaaatgatttggaaggagaggttgagaagtgtttgcaagagcttgtcgatagatgtctagtcctcgtcagcaagagaagtcgagatggaacaaaaattagatcatgtaaggttcatgatctaatatatgacctgtgcgtgagagaagttcaaagggagaacatttttatcatgaacgacattgttcttgacgtatcatatccagaatgttcatatctctgtatgtataaaatgcagccctttaagcgcgtgactggtgatgaaattaattattgtccctatggtctttatagggctcttcttacccctgtaaatcgtcagttgagagatcatgacaacaacaatcttttgaaacgaacccattctgttttctcttttcatcttgagcctttatattatgttctcaaatcagaggttgttcatttcaaattactcaaagtcttggagctgagacacagacagattgatggtttccctcgagagatactaagcctcatctggttgaggtacctatcattgttcagctatgggaatttcgatgtacctccagaaatttgcaggttatggaatctgcagacattcattgttcaacggtttcgatcagatataataatttttgctgaggaaatttgggaactaatgcaattaaggcatcttaaactgcccagattttatttgccagattgcccaagtggatctgttgacaaaggaaggcacttggatttttcaaacttacaaactatttcttacttgtctccacgttgttgcacgaaggaggttattatggggattcagaatgtcaaaaaattaggaatcagtggaaataaggatgactataaaagttttcgggactctgggcttcccaacaatcttgtctatctgcagcaacttgaaatattgagtcttatatctgttgattatagccttttgccagtgatcatttcaagtgcaaaagcttttccagcaacgctcaagaagttgaagttggaaagaacttatctaagctggtcatacttggacatcatagctgagttgcctaaccttgaggtgctgaagctgatggatgacgcttgttgtggtgaagaatggcatccaattgttatgggatttaatcgattgaagcttttgctaattaaatatagttttctcaagttctggaaagccacaaatgacaattttcctgtccttgagcgcctcatgattagaagttgcaaaaatttgaaagagatacccattgagtttgcagatatacacacactacagctgattgagttaagagagtgtcctcccaaacttggggaatctgctgcacgaattcagaaagaacaagaagacctcggaaacaaccctgtggatgttcgtatctcaaatccattgaaggagagtgattctgattcagaagaacattaggaaaggatctcaaggccagaaggattgaactcttgggatttcatttcggccctctatcacaaaataccactaaattatcggtttcaagcaatgtgtgacttccaaggagatgtgatatcttttgtgttgtaacatatttttgagttgtactgattcccttcttcccttctctttttatgtaactttactaattcaacttcaagtactagcagaccacatggttgattgtgatcgagtttgatgattattttatacgatgagacaaccagtttagttttaaaaaaaaaaa

SEQ ID NO: 394 - DNA, 4010 bp, Glycine max
  source 1..4010: mol_type = genomic DNA
aatacagctgttaaagtttgtcttgttgggaacactcaacagttattggttgactcaatcttaattaaagccatccttcataaaattgcctatcactgatttgatcagttcatgaaccctgcactgcacttcaaattactcattttcattcatccactcaactccctttcctaccatggcactagaattggttggtggtgctcttctttctgctttccttcaggttgcgtttgagaagcttgcttctcctcaagttctggacttctttcgtggaagaaagcttgatcaaaagctgctcaacaacttggaaatcaagctgaactccatacaggctctggctaatgatgcagaactaaagcagttcagagatccacttgtcagaaactggcttcttaaggtcaaagatgctgtgtttgacgcagaggatatcttggatgaaatacaacatgagatctccaaatgccaggtcgaagctgaagctgaagctgagtctcaaacctgcacttgcaaggtaccaaatttcttcaaatcttctcctgctagttcctttaacagggaaattaaatccaggatggaagaaatccttgatagattagatcttctctcaagccaaaaggatgatctaggcttgaaaaattctagtggtgttggcgttggatcagaattgggtagtgcagtaccacagatatcacaatcaacatcttcagttgttgaaagtgatatttatggcagagataaagacaaaaaaatgatttttgattggctgacatctgacaatggcaatcctaaccagccatcgatactttctattgtgggcatgggtgggatgggtaagaccacacttgctcaacatgtattcaatgaccctaggatcgaggaggctagatttgatgtcaaagcttgggtctgtgtttcagatgattttgatgctttcagggtaacaagaacaattcttgaggccatcactaaatcgactgatgatagtagagacctagagatggttcacggaagattgaaagaaaaattgacggggaagagatttcttcttgttttggatgacgtttggaacgaaaaccgacttaaatgggaagctgtgctaaaacatcttggttttggggctcaggggagtagaattattgccaccacacgtagtaaggaagttgcttctaccatgaggtcaaaagaacacctcctggagcaattacaagaagatcattgctggaagttgtttgctaaacatgcattccaagatgataatattcaaccaaatccagattgcaaggagattggtatgaagatagttgaaaaatgtaaaggacttcctctggccttgaaaacaatgggaagtctattacacaacaagtcatctgttacggaatggaaaagcatattgcagagcgagatatgggaattttcaacagagcgtagtgatattgtacctgctttagcactaagctatcaccatcttccttctcatctcaagagatgttttgcttattgtgccttattccccaaagattatgagtttgataaggagtgcttaatacaattgtggatggctgaaaaatttctacaatgttctcaacagggtaagagtccaggagaagttggtgaacaatacttcaatgatctattatcaaggtgcttctttcaacaatcaagcaacacagagagaacagattttgtcatgcatgaccttctcaacgatttggcaagatttatttgtggggacatttgtttcagattggatgggaatcaaacaaaaggtacaccaaaagcaacccgtcattttttaattgacgttaaatgttttgatgggtttggaactctatgtgacacaaaaaagttacgtacttatatgccaacaagttacaaatattgggattgcgagatgtcaatacacgaattgttctccaagtttaattacttacgtgtcttatctctgtttgattgtcatgacctaagagaggtgcctgactctgtgggtaatctcaaatatctccgttcgttagacttatccaatactaaaatagaaaaactacctgaatcaatatgttcactctacaacttgcaaatactgaagctaaatggttgtagacatttgaaggagctgccctcaaatttgcataaactcactgatttgcatcggcttgaattaatagaaactggagtgagaaaggtaccagcacatttgggaaaactggagtatcttcaagtattaatgagttcgtttaatgttggcaaaagtagggagttcagtatccagcagttaggagaactcaatcttcatggaagtctatcaataaggcaactgcagaatgttgagaatccatcagatgcattagcggtggatttaaaaaataaaacacaccttgtcgaggtagagttagaatgggattcagactggaaccctgatgattcaacaaaagaaagggatgtaatcgagaatctacagccttccaaacacttggagaagttgaggatgaggaactatgggggtactcaatttccaaggtggttattcaacaattcatcatgtagtgtggtgtccttaaccttgaagaactgtaaatattgcctatgtttgcctccccttggacttttgccatctctgaaggaactttcaattaaagggcttgatgggatcgtgagtatcaatgctgattttttcgggagtagctcttgttcatttacatccttgaaatctttggagttctaccatatgaaggaatgggaagaatgggaatgtaaaggtgtgacaggtgcttttccacgtcttcaacgtctttctatagagcgttgtcccaagctgaaagggcacttgccagagcaactatgtcatttaaattctctaaagatttctgggtgtgaacaacttgtaccttctgctctcagtgcccctgatattcataaattatacctaggagactgtggagagctgcaaattgatcatgggacaactttgaaagagcttaccattgaaggtcacaacgtggaggcagccttattcgaagagattgggcgcaattactcttgttcaaataacaatattcccatgcacagttgctatgatttccttgtaagcttgcgcatcaaaggtggctgcgactctttaacgacctttccgctagatatgttcacaatactcagggaactttgtatctggaagtgtcctaatctacggaggatttcacaagggcaggctcataatcatctccagactctggatatcaaagagtgcccccaattagaatcattgcctgaaggaatgcatgtcctccttccatctcttgattctctgtgcatagatgattgtccaaaagttgaaatgtttcccgaaggaggtttgccatcaaatttaaaagaaatgggtctctttggtggtagttacaaacttatctccttattgaaaagtgccttgggaggcaatcactctctagaacggttagttattggaaaagtggattttgagtgtcttcctgaggaaggtgtactgccacactctcttgtttctctacagatcaatagctgtggagatcttaaaagactggactacaaaggtatctgccacctctcctctctcaaggaattgagtcttgaagactgccccaggctccaatgcttaccagaggagggtctgcccaaatccatttcaactttgtggatttggggggactgtcagttgctcaaacaacgttgccgggaacccgaaggcgaagactggccaaagattgctcacttttgcccgttgctcaatcaacgttgccgggaacccggaggcgaagactggccaaagattgctgacattgaaaacgtgtatataaggtagtgaggttgattataaagaataatggtgaaagatgtagatgcttctctattgcctgcaatttactaaataattgttttctaaacttatttttgctttctgcttgctggacgccgccgctcagttatttattattcgacaaaataattgtttaatatagtttcaagtgattgattctgcttgg

SEQ ID NO: 395 - DNA, 3639 bp, Glycine max
  source 1..3639: mol_type = genomic DNA
atggcagtagaattaattgctggtgctcttctttcttctttccttcaggttgcattcgaaaagcttgcttctcctcaagttctccacttctttcacggaaaaaaacttgatgagacgcttctgagaaagttgaaaattaagctgctgtccatcgatgctctggctgatgatgctgaacgaaagcagttcgcagatccacgcgtgagaaactggcttcttgaggtcaaagatatggtttttgatgcagaggatctcttggatgaaatgcaatatgaattctccaaatgggaactggaagctgaatctgaatctcagacctgtaccggctgtacttgcaaggtaccaaatttcttcaaatcttctcctgctagttcctttaacagggaaattaaatccaggatggaaaaaatccttgatagcttagaatttctctcaagccaaaaggatgatctaggattgaaaaatgctagtggtgttggcgttggatcagaattgggtagtgcagtaccacagatatcacaatcaacatcttcggtggttgaaagtgatatttatggcagagataaagacaaaaaaatgatttttgattggctgacatctgacaatggcaatcctaaccagccatcgatactttctattgtgggcatgggtgggatgggtaagaccacacttgctcaacatgtattcaatgaccctaggatccaggaggctagatttgatgtcaaagcttgggtctgtgtttcagatgattttgatgctttcagggtaacaagaacaattcttgaggccatcactaaatcgactgatgatagtagagacctagagatggttcacggaagattgaaagaaaaattgacggggaagagatttcttcttgttttggataacgtttggaacgaaaaccgacttaaatgggaagctgtgctaaaacatcttgtttttggggctcaggggagtagaattattgccaccacacgtagtaaggaagttgcttctaccatgaggtcaagagaacacctcctggagcaattacaagaagatcattgctggaagttgtttgctaaacatgcattccaagatgataatattcaaccaaatccagattgcaaggagattggtacgaagatagttgaaaaatgtaaaggacttcctctggccttgaaaacaatgggaagtctattacacgacaagtcatctgttacggaatggaaaagcatattgcagagcgagatatgggaattttcaacagagcgtagtgatattgtacctgctttagcactaagctatcaccatcttccttctcatctcaagagatgttttgcttattgtgccttattccccaaagattatgtgtttgataaggagtgcttaatacaattgtggatggctgaaaaatttctacaatgttctcaacagggtaagagtccagaagaagttggtgaacaatacttcaatgatctattatcaaggtgcttctttcaacaatcaagcaacacaaagagaacacattttgtcatgcatgaccttctcaacgatttggcaagatttatttgtggggacatttgtttcagattggatggtgatcaaacaaaaggtacaccaaaagcaccccgtcacttttcagttgcaatcgaacacgttcgatactttgatgggtttggaactctatgtgatgcaaaaaagttacgttcatatatgccaacaagtaacaaaaagatttttgattacttctcttcttgggatcgcaatatgtcgatacatgaactggtctccaagtttaagttcttacgtgtcttatctttatctcattgttctaacctaagcgaggtgcctgactctgtgggtaatcttaaatatctcagttcgttagacttatccaatactgaaatagtaaaactacctgaatcaatatgttcactctacaacttgcaaatactgaagctgaattattgtaaacaattggacgagctgccctcaaatttgcataaactcactgatttgcatcgccttgaattaatagatactggagtgagaaaggtaccagcacatttgggaaaactgaagtatcttcaggtatcaatgagtccgtttaaggttggcaaaagtagggagttcagtatccagcagctaggagaactcaatcttcatggaagtctatcaattcagaacctgcagaatgtcgagagtccctcggatgcattagcagtggatttgaaaaataaaacacaccttctggaggtagagttagaatgggattcagactggaaccctgatgattcaacaaaagaaagggatgaaattgtaatcgagaatctacagcctcccaaacacttggagaagttgaggatgaggaactatgggggtaaacaatttccaaggtggttattaaacaattcattattgaatgtggtgtccttaaccttggagaactgtcaatcttgccaacgtttgcctccccttggacttttgccatttctgaaggagctctcaattcaagggcttgcagggattgtgagtattaatgctgattttttcgggagtagctcttgttcatttacgtccttggaatctttgatgttccacagtatgaaggaatgggaagaatgggaatgtaaaggtgtgacaggtgcttttccacgtcttcaacgtctttctatagagtattgtcccaagctgaaggggcacttgccagagcaactatgtcatttaaatgatctaaagatttatgggtgcgaacaacttgtaccttctgctctcagtgcccctgatattcatcaattatccctaggagactgtggaaagctgcaaattgctcatccgacaactttgaaagagcttaccattacaggtcacaacgtggaggcagccttactcgaacagattggacgcagttactcttgttcaaataacaatattcccatgcacagttgctatgatttccttgtaaggttggtcatcaatggtggctgcgactctctaacgaccattccactagatatgttcccaaaactcagggggcttgatatcgggaagtgtcctaacctacagaggatttcacaggggcaggctcataatcatctccagagtctgtatatcaaagagtgcccccaattagaatcattgcctgaaggaatgcatgtcctccttccatctcttcattatctgagcataagggattgtccaaaagttgaaatgtttcccgaaggaggtttgccatcaaatttaaaaggtatgagactccatggtagttacaaacttatgtcctcattgaaaagtgccttgggaggcaatcactctctaattagcttatatattggaggagtggatgttgagtgtcttcctgacgaaggtgtactgccacactctcttgtttctctatggatcagtgactgtgaagatcttaagagactggactacaaaggtctctgccacctctcctctctcaagaacttgtttctttatgactgccccaggctccaatgcttaccagaggagggtctgcccgaatccatgttatctttgcacatttacgattgtccgttgctcatacaacgttgccgggaacccgaaggcgaagactggccaaagattgctcacattgattataaagaatttaatggtgaggttgattataaataa

SEQ ID NO: 396 - DNA, 3306 bp, Hordeum vulgare
  source 1..3306: mol_type = genomic DNA
atggtgagcgccttggcaggggtgatgacctctgtcatcggcaagctcaccgccctgctcggggaggagtacgcaaagctgaaaggtgtgcacagggaggtggagttcatgaaagatgagctgagcagcatgaacgcgctccttcagaggctggcagaggcggaccgtgatcttgatgtgcagacgaaggaatggagggaccaagttcgggagatgtcttacgacattgaggattgcatagacgactttatgaaaagccttggccaaactgacagtgctcagacagcagggcttgtgcaaagtgtggtccagcagctcaaggcgctgagggcgcgccatcaaatatccagcaaaatccaggggctcaaggcacgtgttgaagatgcaagcaagcgacgtatgaggtataagcttgatgagcgcaccttcgagcctagcatctcaagggctatcgaccctcgtttgccttcactctatgctgagcctgatgggcttgtcggtattgacaagccaagagacgagctcattaagtgcctaatggaggggatgggtgcatcagtgcagcagcaaaaggtgttatctattgtgggtcctgggggtctcggtaaaactacacttgccaatgaggtgtaccgtaaactggaaggccagttccagtgtcgagcttttgtttccttgtcacaacaaccagatgtgaataagatcttaagaaatatactctctcaagtctgccagcaagagcttcctagcacaagtgtacaggacgagggaaaactcattgacgcaatcagagaagttttaaagaacaagaggtacattcaccaactttgaattagttggctgttggtactgcatcattttttcttcagcattgatgcttatttagtagcctagccattctactatagtctactgttgtttaattaaattaaatatagatgattttgtttcattttaagcatatatatgcaattgtgaatagtgctttgattcacagttcatgaggttatctatctaaagggctcaaaagacttcctttaaatatcgtaaccccctatgataaattcaactttttgtggtgtggccaaaccattggggaaggggataatggctgtctgtaatagtaatatatagaagagaaatgattctgtccccataaacagtgaatttcaagaaacctgaagccctatatcattctcatgatttactaacatttgacgacaaggaaacatgccattttatttatttgttcacatattttccttattcatgagatttgcaaaacatgcactttgcaggtacttagttgttattgatgatatatggagtactcaagcatggaagattatcaaatgttctttgtttctgaatgacctgggaagcagaataatgacgacaacacgtagtattgatatagccaagtcatgttgctctcggcgccatgatcgtgtctatgaaataatgcctctgacgacagccaactctaagggtttattttttaaacgaatatttggctcagaagatatatgtcctcctcaattggaagaaatctcctcggaaatattaaaaaaatgtggtggttcaccattagcgattcttacaatagcaagtttattggccaataaagatagcacaaatgaagaatggaagtgggtgtataattcgatcggttcgacactgggaaaggaccccggtgtagaagagatgagaaggatactatctcttagctacgatgatcttcctcaccatttgaagacatgtttattgtatctgagtatatttccggaggactatgagattgagagggatcgattgataaggaggtggatcgctgaaggattcattgatacagatggtggacgagatttggaggaaataggagagtgttattttaatgatcttatcaatagaagtatgcttgagccagtgaaaatccaatatgacggtcaagtcgtttcatgccgagtgcatgatatgattctggatctccttgcatctaagtcaattgaagaaaactttgccaccttctctggtaaccaaaatgagatattagtccttcggcataagatccgtaggctatctctcaattattatgccctagagcacaccatgcttccatcaacagcgatcatttctcattgccgttcgctcagtattgtcgggtatgctgaaaagatgccttctctttcgaagtttcgtgttctgcgagtacttgatattgagaatggtgaggagatggagagcaactgttttgagcatctaaggacgcttttccagttgaggtatttgcgactccacgttagaagtatttctgcactccctgagcagttaggagaactacagcatttgaggactctggatatgggctggacaaagatcacaaaaatgcccaaaagcattgttcagctgcaacatttgacatgtttgcgcgtcagtaatttggaattacctgaagggattgggaatctgcaagctctgcaggagctatcagatatcaaagtcaaccggcacagcacggcgtcttgtttgctggagctgggcagtctgaccaaactgaaaatccttgggctacgctggtcaattgtcagtacacacggtaacgaagacacttttgtggataacttggtatcctcgctgcgcaaactgggcagatccagccttcgatccatatgcattcgtagttatcatggctataccatggagttcttactggactcctggttcccctcccctcatctcatgcaaaagtttcagatgggcacgtactacaacttccccagagttcctccttggatcgcgtcgctggacaagctcacatacctagatatcaatatcgatccagtagaagaggaagcactggagatccttggagaattgccttctttgctgtttctctggctgacatcgaaatcggctgctcccaaacagcggctcgtcgtaagcagcagcatgtttgtgcgtctgaaggagctccacttcacctgctggagcaatgggcaaggactgatgtttgaggccggggccatgccgaggctcgagaagctgtgggttccgtttgacgcaggcagcggtcttgattttggcatccagcacctctcttccctcacgcatcttgccgtcgagatcatttgcgtcggcgcgaccgctcgggacgtagaggcgttggaggaggccatcagaggtgcagcccgtctccttccgaaccgccctgcggtggaattccgaacatgggatgatgaaaagatggtggtggaggaggaggaggggcaaggcgtccctgaagaggagatccacgctagcggttga

SEQ ID NO: 397 - DNA, 3306 bp, Hordeum vulgare
  source 1..3306: mol_type = genomic DNA
atggtgagcgccttggcaggggtgatgacctctgtcatcggcaagctcaccgccctgctcggggaggagtacgcaaagctgaaaggtgtgcacagggaggtggagttcatgaaagatgagctgagcagcatgaacgcgctccttcagaggctggcagaggcggaccgtgatcttgatgtgcagacgaaggaatggagggaccaagttcgggagatgtcttacgacattgaggattgcatggacgactttatgaaaagccttggccaaactgacagtgctcagacagcagggcttgtgcaaagtgtggtccagcagctcaaggcgctgagggcgcgccatcaaatatccagcaaaatccaggggctcaaggcacgtgttgaagatgcaagcaagcgacgtatgaggtataagcttgatgagcgcaccttcgagcctagcatctcaagggctatcaaccctcgtttgccttcactctatgctgagcctgatgggcttgtcggtattgacaagccaagagacgagctcattaagtgcctaatggaggggatgggtgcatcagtgcagcagcaaaaggtgttatctattgtgggtcctgggggtctcggtaaaactacacttgccaatgaggtgtaccgtaaactggaaggccagttccagtgtcgagcttttgtttccttgtcacaacaaccagatgtgaataagatcttaagaaatatactctctcaagtctgccagcaagagcttcctagcacaagtgtacaggacgagggaaaactcattgacgcaatcagagaagttttaaagaacaagaggtacattcaccaactttgaattagttggctgttggtactgcatcattttttcttcagcattgatgcttatttagtagcctagccattctactatagtctactgttgtttaattaaattaaatatagatgattttgtttcattttaagcatatatatgcaattgtgaatagtgctttgattcacagttcatgaggttatctatctaaagggctcaaaagacttcctttaaatatcgtaaccccctatgataaattcaaccttttgtggtgtggccaaaccattggggaaggggataatggctgtctgtaatagtaatatatagaagagaaatgattctgtccccataaacagtgaatttcaagaaacctgaagccctatatcattctcatgatttactaacatttgacgacaaggaaacatgccattttatttatttgttcacatattttccttattcatgagatttgcaaaacatgcactttgcaggtacttagttgttattgatgatatatggagtactcaagcatggaagattatcaaatgttctttgtttctgaatgacctgggaagcagaataatgacgacaacacgtagtattgatatagccaagtcatgttgctctcggcgccatgatcgtgtctatgaaataatgcctctgacgacagccaactctaagggtttattttttaaacgaatatttggctcagaagatatatgtcctcctcaattggaagaaatctcctcggaaatattaaaaaaatgtggtggttcaccattagcgattcttacaatagcaagtttattggccaataaagatagcacaaatgaagaatggaagtgggtgtataattcgatcggttcgacactgggaaaggaccccggtgtagaagagatgagaaggatactatctcttagctacgatgatcttcctcaccatttgaagacatgtttattgtatctgagtatatttccggaggactatgagattgagagggatcgattgataaggaggtggatcgctgaaggattcattgatacagatggtggacgagatttggaggaaataggagagtgttattttaatgatcttatcaatagaagtatgcttgagccagtgaaaatccaatatgacggtcaagtcgtttcatgccgagtgcatgatatgattctggatctccttgcatctaagtcaattgaagaaaactttgccaccttctctggtaaccaaaatgagatattagtccttcggcataagatccgtaggctatctctcaattattatgcccaagagcacaccatgcttccatcaacagcgatcatttctcattgccgttcgctcagtattgtcgggtatgctgaaaagatgccttctctttcgaagtttcgtgttctgcgagtacttgatattgagaatggtgaggagatggagagcaactgttttgagcatctaaggacgcttttccagttgaggtatttgcgactccacgttagaagtatttctgcactccctgagcagttaggagaactacagcatttgaggactctggatatgggctggacaaagatcacaaaaatgcccaaaagcattgttcagctgcaacatttgacatgtttgcgcgtcagtaatttggaattacctgaagggattgggaatctgcaagctctgcaggagctatcagatatcaaagtcaaccggcacagcacggcgtcttgtttgctggagctgggcagtctgaccaaactgaaaatccttgggctacgctggtcaattgtcagtacacacggtaacgaagacacttttgtggataacttggtatcctcgctgcgcaaactgggcagatccagccttcgatccatatgcattcgtagttatcatggctataccatggagttcttactggactcctggttcccctcccctcatctcatgcaaaagtttcagatgggcacatactacaacttccccagaattcctccttggatcgcgtcgctggacaagctcacatacctagatatcaatatcgatccagtagaagaggaagcactggagatccttggagaattgccttctttgctgtttctctggctgacgtcgaaatcggctgctccgaaacagcggctcgtcgtaagcagcagcatgtttgtgcgtctgaaggagctccacttcacctgctggagcaatgggcaaggactgatgtttgaggccggggccatgccaaggctcgagaagctgtgggttccgttcgacgcaggcagcggtcttgattctggcatccagcacctctcttccctcacgcatcttgccgtcgagatcatttgcgtcggcgcgactgctcgggacgtggaggcgttggaggaggccatcagaggtgcagcccgtctccttccgaaccgccctgcggtggaattccgaacatgggatgatgaaaagatggtggtggaggaggaggaggggcaaggcgtccctgaagaggagatccacgctagcggttga

SEQ ID NO: 398 - DNA, 3921 bp, Nicotiana benthamiana
  source 1..3921: mol_type = genomic DNA
atgttgacttcatcttcccatcatggacgcagttatgatgttttcctaagctttaggggagaagacactagaaaaacatttgtgggtcatctgtttaatgctcttattgaaaagggtattcacacattcatggatgataaggagttaaagagagggaagtcaatctcatctgaactcatgaaagccattggagaatcaagatttgctgttgttgtcttttccaagaactatgcttcctctacatggtgcttggaagaactggtaaagattcttgaaattcatgaaaaatttgagctaattgttgtcccagttttctatgatgtggatccatcaactgtgaggaaacaaaatggggagtatgctgtttgttttactaaatttgaagctaacttggttgatgatagagacaaagtgctaaggtggagggaagcacttactaaggtagctaacatatcagggcatgatttgcgcaacacttacaatggggatgaatcaaaatgcatacaacagatactgaaagacatattcgacaaattttgtttctctatctcaataactaacagagatttagttggaatagaatctcaaattaagaaactaagttcattgttgaggatggacctgaaaggagttcgtcttgttgggatttgggggatgggtggtgtgggaaagacaactgctgcaagagcattgtttaacagatactatcagaattttgaaagtgcttgttttctcgaagatgttaaagaatatctgcaacaccataccttgttgtatttgcagaagactctcctttccaaactgttgaaggtagaatttgtagattgtactgatactgaagaaatgtgtgtaatattaaagaggagactttgttctaagaaagttctggttgttcttgatgatgttaatcataatgaccagctggataagctggtcggagctgaagattggtttggtagtggtagtagaattgttatcacaactagggatatgaaactgttgaaaaaccatgatgtgcatgaaacgtacgagataaaggttttggaaaaagatgaagcaattgagcttttcaatttgcacgcattcaagagaagttcacctgaaaaggagtttaaggagctcttaaatcttgtggtagattatactggaggccttcctttagctcttaaggtgcttggttctctgctgtacaaggaagatcttgatgtatggataagtacgattgatagactaaaagataaccctgagggtgaaattatggctacacttaaaataagttttgatggattaagggattatgaaaaaagtatatttttagatattgcatgtttcttcaggggttacaatcaaagagatatgacagcattatttcacgcttctggtttccacccagttctaggagtaaagacccttgttgaaaaatctctcatttttattttagaggacaaaatccaaatgcatgatttgatgcaagagatgggtagacaaatcgcagttcaagaatcaccgatgagaagaatatatcgtccggaggatgtgaaggatgcatgcataggagatatgaggaaagaagcaattgaaggcttgttactcacagagcctgaacagtttgaagagggtgagttggaatatatgtacagtgctgaagctctcaaaaagacgaggaggctgaggatacttgtgaaagaatattacaacagagggtttgatgagcctgttgcctatcttcctaacagtctgctttggcttgaatggcgtaactactcttcaaactcatttccatcaaattttgaaccgtcaaagctcgtatatcttactatgaagggtagttctatcatcgaactctggaatggtgcaaagaggttagcatttttgacaactcttgatctcagttattgccacaaattgatacaaaccccagattttaggatgatcacaaatttggaaaggttgatcctgagctcttgtgatgcattggtggaagtccatccatctgttgggtttctcaagaatcttattttgttaaatatggatcattgcatatcacttgagagacttccagcaattattcaatcagaatgtcttgaagttcttgatctcaattattgctttaacttgaaaatgttcccggaagtggaaaggaatatgacgcacttgaagaaactcgacctcacttcaactgggataagagaactgccggcatcaattgagcatctcagttccctggaaaacctacagatgcattcctgcaaccaacttgtaagtctccctagtagtatttggagattcagaaatctgaagattagtgaatgtgagaaactggggagtttaccagaaattcacgggaatagcaattgtacccgtgaactcatcttaaaattagtttcgattaaggagcttcccacctctataggaaacctcacctcactaaatttccttgaaatctgtaattgcaaaactatttcgagtctctcgagcagcatatggggattgacaagtcttacaactctaaagttgttagactgcagaaaacttaaaaacttgcccggaattcccaatgccataaatcatttgtcaggacatggacttcagctccttctgacattggagcagcccacaatttatgaacgccttgacttgcttaggattattgatatgagctggtgtagttgtattagcagtctcccccacaacatttggatgttgaaatttttaaggattctgtgcatctcttactgctcgagactggagtatttaccagaaaatttgggtcacttggaacatttggaggaattacttgcagatggtactggtattttaagactaccatcttcggttgcacgtttaaataaacttgaggtcttatcattcaggaaaaagtttgcgattggaccaaaagtccaatattcatcatcaatgctcaatttacctgatgatgtttttggaagtcttggaagcttaggctcagtggtgaagttaaatcttagtggaaatggtttttgtaatttgcctgaaacgatgaatcaacttttttgccttgaataccttgatataacattttgccagaggctcgaagcattgccagagcttcccccaagcatcaaggagctatatgtagatgaacacttggccttgagaatcatggaagatttagtaattaaatgcaaggagttgaatttaatagccgtcacaaaaattgagtaccaaaatttctatcgatggttagactcaatatggtcagatgtgtcagaactgctggagaacagtcagaagcaacaactggatgatatgttgcagcttattcccttttcatatctgtcgacggctaagcgtgaggaagttcttaagattgttatccatggaacacgaattccagaatggttcagatggcaagatagaagtgccacaacgatgtcagtcaaccttcctgaatattggtacactgaaaatttcttgggattcgctatatgctgcagctgctgcttttatcattctgcacgtagttacgatgttgaatttgaggggagcatgcatcattacaattatgattccagttattggaaagagtatgaggaaccaagttatgacttttatgagagagatagcattgagattacagcaaaactaactccccgacataaaggaatgcggactgaagagctcaagaaagtctgttcattttccatgaatgtgttacgtcgtgctactgctgtccctaatatgtgctttgcattttttccatttaacagtctctgtcacatatcaaatttacaggcaaataacccaaatgactatgggatatttgaaacctgtttgagtccaggggacatccgccatcgtggaaaacaatgggggtttaatttggtgtataaagatgaaactggtggcagtgttacacacgaaatgctcataaacagatag

SEQ ID NO: 399 - DNA, 2538 bp, Nicotiana benthamiana
  source 1..2538: mol_type = genomic DNA
atggtggatgcggtggtcactgtattcttggagaaacttctgcatgttctcacagaggagagtaggtttcttactaaatacagacagcagtttgaaaaactgaagaacgagctgctattcatgcaaagctttctcaaagatgcagagaggctcaagaggaaaaacaacacccttaaaggggtcatgtcctgtttgcgagacttaatctttgaagctgaagagatacttgaggactgccagaatcaatctgcagatagcgatcgggctactacatgcttccatcctaaaaggctctctcttcgccatcaaactgggaagtgccttgctaaaatcaatgacagaatctcggagataaagcaaaacatttcaacatatcttggagtaccacttctcgaagaaggaagtatggaggcacacaataatctaatgtcaagatggacttcttccctttatgaccacactcaggtagttggtttggaaggtgacactgagaagataaaggattggctatttgaagcaagagatggtttacttaccattgcatttgtgggtatgggaggacttggtaaaaccactcttgctcagaaagtcttcaatgacaaaagggtggaggatcacttggagaggaggatttgggtgtctgtttctcaaacatttactgaggaacaagtcatgagaagcatattgaggagtttaggagatgcatgtgttggtgatgaccagtgtgaactgttaagaaaaataaaccagtaccttttgggaaagaggtttttgattgttatggatgatgtttggagctgggacaatgcctggtggcaaaaaatctatactggactgcccaaaggaaatgggagcactgttattgtaacaacgagaaatgagctagtcgctcgcaagatgggagttacagaagcaagaatacattggccaaaattcctcaatgagcactacagttggttactattccggaagattgcatttgcaggaagtgcaggtgaatgccatttccccgagttggaggacgtgggaaaggagattgtggaaaaatgcaagggtcttcctttagcaatcaaagcagtaggaggagtgatgctttgcaagccatcttactatcacgaatggaggcgtatttcaaatcatttccgtgatgaattgaaagaaaatgatgactcagtgatggcctcactacagttgagctatgatgaactccctccttacttgaaatcctgtttcctctgtttttcactatttcctgaggattgtgtcataccaaaagaccaactgatccgttggtggattggagaaggtttcatacctctgagaagtggtaggttatcgactgaagtgggagaagattgtttctcacaactatccaatcggtgtttgatagaagttgttgataaggcttacaatggtgtgatccacacatgcaaaatgcatgacatggttcgtgacttggtgatcaaattagccgaggatgatgcatttttcaccccagctgatgcaacttgtcggcatttgggtattaagagtgagatgaattggaagcaactattgagcaatcaaaaattacgagcactgctaacaaccaccaagagtggtgaagttaacaaaatccattccgacattgccaagaagctgtgcaagagtcgacacctccaagtattggatctgtcaaaatcaattttcgatgtgcctctttcaagtttgttggaaggaattggatctgctaagcagctcacttatctcagtttaagcaatacacatccaatgattggagttccagcttccatatccaagcttgaaaaattacagattttggatttcagctattgccaaaatatgaaaatgctcccctcttgcgttctgacatttgaggaacttgctgttttggatgtgaacaactgtggttcccttgagtaccttccaaaaggattaagtaggctttccaatcttcaagtattgcttgggtttaagcctgcaaaattaagccaaccaggaggttgtcgtattgctgagctcagaagcctgactcgactcagaactctcagtttaagactaaccgaaaatgaggagattggagacgatgaggggaacgcactggtagatctccaagaacttcaatttttaacaataagttgctttggcagtcaagataatggacttgcgacaaaacttggtagactttatcctccacgacaactccacgagctgattctcaaattttatccaagtaagacaagtcctgaatggcttaaccccaatctctcccccatgttgcgatatttatcaatcatctctggtgatattacacaaatgcacgagaacttctggggtgatggtagtactgcttggaaaattgagggcttaatgttggaatctttatcggatttgagattggaatggtcagcaatgcatcaagtcatgccttcgttaagaatactcaaggttagctggtgccctgagttggagtcatttccaattgaagatgcagggtttagagggggtctatggaagaaggaagaacataggaactga

SEQ ID NO: 400 - DNA, 8394 bp, Oryza sativa
  source 1..8394: mol_type = genomic DNA
tcctcgagggtatagaccatatttcccctggtttccattgatgtggcatatatcagggcccactacctcaaccatcaccacgtccagtcctttcggcctgttcgcgatgacgagctcggccaccacctcaacatcgtccatgctgcggcgatggcgaggagacagctgggacggtgaacctcatagctccgtctgttgcaacatcctctcgccatgctcacgtcgccacgacacccttgtcctcctgctccgtagcagcctcgcaagctcacgccgcggcctcgtcgaggtcctctgtccccgagccgcttctagcatcgatgagctgaggaactccccactgccgaggcgatgacgatttggcagggagggctcgattcgcccactccaattcgcagcttcacacctcccctccccctcctattcatccaccaccaacgcggataggagaagggatagaggaaggtgtgcgtggacacttacatgttggtcccatatattttttttactcggatgccacgtcagataaaacaaccgtcggtcaacatttttcgtattgcggattaggaacgtcattcatgactcgacgcagagctgagggatggcaagtgaacttattcccataaaacttccaaaagtttggaatgctcaacttgggcttctcttcggatgctgaagtgctaatgggccaaataaccaactagcccacagcccatcgaagtggaagccgacgagtccaccgtcaacgcggcagtagtaatccgagaaaacgcgggtcgcgcgaagcaatcgatcatcatcagacgattaatccacgacgaccaggagcgctgccccgagccacacgcccacacgcactggtgaatcttctcctttccacctagttttcactctgcagtctcctctcctagctactactctgccttcccatcctcgcttgttgcagccctcttgcacacgccattggccacagtccaaggactgctcctgttccgatggaggaggtggaagccggtttgctggagggcgggatcaggtggctggcggagaccatcctggataacctggacgccgacaagctggatgagtggattcgccagattaggctcgccgctgacaccgagaagctacgggctgagatcgagaaggtggatggggtggtcgctgccgtgaaggggagggcgatcgggaacaggtcgctggcccgatctctcggccgtctcagggggttgctgtacgacgccgacgatgcggtcgacgagctcgactacttcaggctccagcagcaggtcgagggaggaggtactgtctttgcatatatccgtgccttttaattaagtttgcaagctgcgttgcctgcaacaatggcgtattggcgtcagtttccaatccatgcttgtgctacagttactacacggtttgaggctgaagagacggtcggagatggagcagaggacgaggacgatattccgatggacaatactgatgtaccggaggcagtggcggcaggcagcagcaagaaacggtccaaggcatgggaacactttactaccgtagagttcactgctgacgggaaggattctaaagcacggtgcaagtactgccacaaggacctatgttgcacatctaagaacgggacatcagctttgcgcaaccatctcaatgtttgcaagaggaaacgtgtaacaagtactgaccaaccggtaaatccatcaaggtaatgctaatggagttctgaatttagtgtaaatccgttgaagtgtaaatttggcccgttacatctgcttaagatctcattctgtctctaatcttctaatagccaactcatggtcattttttttcctaatatatagtaccggtgatggtgcaccaaatgtaattagatgcaaggaaacaaaagtgaacaattgtatatatcaaatataattatatctaaaacatgagtagtgtatcaaatccaattctttcaaaaatctactatgcaaaattgagtgacaaaatctgctgccttttttttttacagaaagcaaccaattaatataagtcaaatataaaaacgctttgtagtctccaataaaatagctcattgtttcgtttatacttatgtttataaatttaaatttaaaacttaattttggagttgattttgtggttttcttttcatcctattttattttacaacatttgattttgaatagttaagaatgcgtatataaaaattttacccataagttattttttaaattgttaataaatcgtaaggataatcataagtataagtgaaacgattcgctcttcatctacttaagattgcgttatattgctgacctttctaatcgcctaaccacgatcacatgctcttccagtgccggtgagggtgcatcaaatgcaactggtaattcagttggcagaaaaaggatgagaatggatgggacttcaacacaccacgaggcagttagcacgcacccttggaacaaggctgaactttccaacaggatccaatgcatgactcatcagttagaagaggctgtaaatgaggttatgaggctatgtcgatcctcaagttcaaaccagagtcgacagggtacaccaccggccacaaatgcaacaacatcgtcttatcttccggagcccatagtgtatgggagggctgcagagatggaaaccatcaaacagctgatcatgagcaatagatctaatggcataaccgtcctgccaattgtaggcaatggagggataggaaaaaccactttggcgcaactggtctgcaaagatctggtaattaaaagtcagtttaatgttaagatatgggtgtatgtatctgataaatttgatgtagttaagattacaaggcagattttggatcatgtctccaaccagagccacgaaggaataagcaaccttgatacgcttcagcaggatcttgaggaacaaatgaaatctaagaagttcctcattgtcttagatgatgtgtgggaaatccgtacagatgactggaaaaaactactggctcctttaagacctaaagatcaggtgaattcgtcacaggaagaggcaacaggtaatatgataattttgacaactcgtatacagagtattgccaaaagtcttggaacagtacaatcaattaagttagaagctctgaaagatgacgatatatggtcactatttaaagtgcatgcttttggtaatgataaacatgatagtagtccaggcttacaggttcttgggaagcaaattgctagcgagctaaaaggcaacccactggcagcaaaaactgtgggttcactattaggaacgaatcttaccatcgatcattgggatagcattataaagagtgaagaatggaaatccctgcaacaagcttatggcatcatgcaagcgctgaagttgagctatgatcatctatccaaccccttacagcaatgcgtctcttattgttctcttttccccaagggttattctttcagcaaagcacaactaatacaaatatggattgctcaaggatttgtggaagaatccagtgagaagttggagcagaaaggatggaaatatctagctgagttggtaaattcgggtttccttcagcaagttgaaagcacacggttttcatcagaatattttgttatgcacgatcttatgcatgatttagcgcaaaaggtttcacaaacagaatatgcaactatagatggctcagagtgcacagagttagccccaagtatacgccatttgtcaatagtaactgattctgcataccgcaaggagaaatatagaaacatatctcgtaatgaggtgtttgagaaaaggttgatgaaagttaagtcaaggagtaagttgaggtcactggtattaattgggcaatatgattctcatttttttaaatatttcaaagatgctttcaaggaagcacaacatctgcgactgctgcagatcactgcaacttatgctgattctgattcatttctctccagtttggtaaattctacacatctccggtatctgaaaattgtgaccgaagaatccggcagaactttgccccgatctctaaggaagtattaccatcttcaagtactagatattggctatagatttggaattccccgtatatctaatgatataaataatcttctcagcctgcggcatcttgttgcatatgatgaagtgtgttcttccattgctaacattggtaaaatgacctcacttcaggaactaggcaattttattgttcagaataatttaagtggttttgaggtgacacaattgaaatccatgaacaagcttgtacaacttagtgtgtctcagcttgaaaatgttagaactcaggaggaggcatgtggggcaaaactgaaagacaaacaacacttagaaaagctacatttgtcctggaaggatgcatggaatggatatgacagtgacgaaagctatgaagatgaatacggcagtgatatgaatatagaaacagaaggggaggaactgtcagttggtgatgccaatggtgcccaaagcttacaacatcacagtaatataagctctgaacttgcttcaagtgaggtgctcgaaggtcttgaaccacatcacggcctcaagtatctacggatatctgggtataatggatctacctccccaacttggcttccttcttcacttacctgtctgcaaacacttcatctagaaaaatgtggaaaatggcaaatacttcctttagaaaggctagggttacttgtaaagctcgtgttgatcaaaatgaggaatgcaacagaactctcaatcccttcactggaggagcttgtgttaattgcattgccaagcttgaacacatgctcctgcacttccatcaggaacttgaactccagtttaaaggttctgaaaattaagaattgccctgtactgaaggtatttcccttgtttgagatttcccagaaatttgaaatcgagcggacgtcgtcatggttgccccatcttagcaagcttaccatctataattatcctctttcctgtgtgcacagttctctgccaccttccgcaatcagtggttatggagaatatggaaggtgtacccttccgcaatcacttgaggaactttacatccatgagtattctcaagaaactctgcagccctgcttttcagggaacctcactctcctgagaaaattacatgtactgggaaactcaaatttagtgtctctgcagctccattcctgcacagcactcgaagagttgataattcaaagctgtgagtctcttagttctctggatggcttgcaattgcttggcaatctcaggttgctgcaggcacatagatgcctcagtggtcatggagaagatggaaggtgtatccttccgcaatcacttgaggaactttacatccatgagtattctcaagaaactctgcagccctgcttttcagggaacctcactctcctgagaaaattacatgtactgggaaactcaaatttagtgtctctgcagctccattcctgcacagcactcgaagagttgataattcaaagctgtgagtctcttagttctctggatggcttgcaattgcttggcaatctcaggttgctgcaggcacatagatgcctcagtggtcatggagaagatggaaggtgtatccttccgcaatcacttgaggaactttacatccatgagtattctcaagaaactctgcagccctgcttttcagggaacctcactctcctgagaaaattacatgtactgggaaactcaaatttagtgtctctgcagctccattcctgcacagcactcgaagtgttgataattcaaagctgtgagtctcttagttctctggatggcttgcaattgcttggcaacctcaggttgctgcaggcacatagatgcctcagtggtcatggagaagatggaaggtgtatccttccgcaatcacttgaggaactttacatccatgagtattctcaagaaactctgcagccctgcttttcagggaacctcactctcctgagaaaattacatgtactgggaaactcaaatttagtgtctctgcagctccattcctgcacagcactcgaagtgttgataattcaaagctgtgagtctcttagttctctggatggcttgcaattgcttggcaatctcaggttgctgcaggcacatagatgcctcagtggtcatggagaagatggaaggtgtatccttccgcaatcacttgaggaacttttcatcagtgagtattctctagaaactctgcagccctgcttcctgacgaatctcacctgcttaaaacaattaagggtatcaggcaccacaagtttcaaatctctagaactgcaatcatgcactgcactcgaacatttgaagattcaaggttgtgcgtcgcttgctacattggaggggttgcaattcctccacgccctcaggcatatggaagtattcagatgccctggcttgcctccatatttggggagttcgtcagagcagggctatgagctatgcccacgactggaaaggctcgacatcgatgacccctctatccttaccacgtcgttctgcaagcacctcacctccctccaacgcctagagcttaactattgcggaagtgaagtggcaagactaacggatgagcaagagagagcgcttcagctcctcacgtccctgcaagagctccggtttaagtattgctacaatctcatagatcttcctgcggggctccacagccttccctccctcgagaggttggagatccggagttgcaggagcatcgcgaggctgccggagaagggcctcccaccttcgttcgaagaactggatatcatcgcttgcagtaatgagctagctcagcagtgcagaactctagcaagcactctgaaggtcaaaattaatgggggatatgtgaactgattactcggtggcttgttaggcgcacctttttccacctgcccaactggcgtgggctcgttcaggcgttcaagctgctgtaaattccattgccgcaatgacgaccttcagaaccgttacacaatacaaaggacatatgatggctagatcaactgtcgcagagctagctttggttcacctgaaaacataaggccaaacgcgtggttcttttaatcagaagtatcaaaaattggttttggtttttaacgaaaagatgttagaaattggttttaatgtgccagattctgtaccagaattctgtattttgctccgtaattctgtgctacgactgatgttgtatttaactgatagcaatcgaccggcaaaaccaatccgctccaatgcattgtcacatacaaattctataattctatctactgaaaaggatgattgctgttcattttcgtgattacagaaggaactgtgtatatcgtgctatttttgcattcacattgtgtcccaggttgtgctcggatcagccaatttcggtggttaattcactttgttgtgtcctctgtgcactcaagaattgttcgcacatgcaattcagttgagcatcgcactacgcaagttttttttgttaacaaaggagtggttgacagcattgcaggttgctaaaaccgtgtcaaaaatttgctaacaaaagaattctcttcagaaatagtatgaaaataaatgccacataagtaatctgagtaaaacagacagaatcactagagaagactaacgacaaaatcttctttttcaatttctgtggtgaaaaactcactaactccgcatataatctcatgtatgcattggaggtgcataccatttcgatcatgtatgcatttagctgaacattatcaagaagcaaatttattgcacgggcaaacataagctaaactaattctcaagcaatttaataatcacaaaacagtctgcaataccaagatatataaaacttttgccagcatggagcaacaacaccgaaacactacaatcaagacagctcccagaaaagattatatgttgctacttcaattgccacagttacaatcacccataatgacacatcaaattacataagagtattaagagtatatgacagttgtaacaaaacaactgcattgagaactagaacagacagccacatgaaccatattcacttcttcagatcagaaagcctggtgaactaccagtctaccaattgctaccgtagtctccatttttcacttatatgtacataggacacctgcgctatcagaatagccacaaagccagttcactcgctacaaattaatcttgactaaatccaaacagataccaactcctcttaatcaacttacaaaacacctacacttttggtgtctctacaccaccaatcacacaaaaggaaattaatcatccaccaactcgtatcctactgttagaatggaggccttacaccagagaatgggcattgccagattctgagacactgtcctttgagctccctga

SEQ ID NO: 401 - DNA, 3441 bp, Solanum lycopersicum
  source 1..3441: mol_type = genomic DNA
atggcatcttcttcttcttcttctgcaagtaattcaaagtattatcctcgatggaagtacgttgtttttctaagtttcagaggtgaagacactcgaaaaacatttacaggtcacttatacgaaggtttgagaaatagaggaataaacacatttcaagatgataaaagactagagcatggagattcaattccaaaagaactcttgagagctatagaagattctcaagttgcacttatcattttctcaaagaattatgctacatctaggtggtgcttgaatgaactagtgaagatcatggaatgcaaagaggaagaaaatggacaaacagtcataccgatcttttataatgtggatccatcacatgttcgataccaaactgaaagctttggagcagcatttgccaaacacgaatcaaagtataaggatgatgttgaggggatgcagaaggtgcaaagatggagaactgccctaactgctgccgcaaatctaaaaggatatgatatccgtaacgggattgaatcagagaatattcagcagatcgtagattgcatctcttccaaattttgtacgaatgcttattctttatcttttttgcaagatattgtgggaataaatgctcacttagagaaactaaaatcgaaacttcaaatagaaatcaatgatgttcggattttagggatctggggaataggcggagtcggtaaaacaagaatagcaaaagccatttttgatactctatcttatcaatttgaagcttcttgttttcttgctgatgttaaagaatttgcaaaaaagaataaactgcattctttacaaaatattcttctctctgaactgttaaggaaaaaaaatgattacgtctacaacaagtatgatggaaagtgtatgattccaaacagactttgttctttgaaggttctaattgtgcttgatgatatagatcatggtgatcagatggagtatttagcaggtgatatttgttggtttggtaatggcagcagagttattgtaacaactagaaacaaacatttgatagagaaagatgatgcgatatacgaagtgtctacactgcctgatcatgaagctatgcaattattcaatatgcatgcttttaaaaaagaagttccaaatgaggattttaaggagttggcgttagagatagtaaatcacgctaaaggcctccctttagccctcaaggtgtggggctgtttattgcataaaaaaaatctctctttatggaaaataacagtagagcaaataaagaaagactctaattcagaaattgttgaacaactcaaaataagttatgatgggttggagtccgaagagcaggaaatatttttagatatagcatgtttcttccgcggagagaaaagaaaagaggtcatgcaaattcttaagagttgtgactttggagctgaatacggattggatgttctgattaataaatctcttgtgttcatatctgaaaatgacaggattgaaatgcatgatttgattagagatatgggtagatatgtggtgaaaatgcaaaagcttcagaaaaaacgtagcagaatatgggatgttgaagatttcaaagaagtgatgatagactatacggggaccatgacagtggaagcaatctggtttagttgctttgaagaagtacgttttaataaggaggcaatgaaaaaaatgaaaaggcttaggatattacacatatttgatggttttgtcaaattcttctcttcgcctccctcttccaattccaatgattcagaagaagaagatgattcctacgacttagtcgtagatcaccatgatgactctattgagtacctgtccaataacttgcgttggttagtctggaatcactattcttggaagtcattgccagaaaattttaaaccagaaaagcttgttcatcttgaactccgttggagttcgcttcattatttatggaagaaaacagagcatttgccgtctctacgaaagctagatctcagcttatctaaaagtctggtgcaaacaccagatttcacggggatgccaaatttggagtatttgaatctggagtactgtagtaagcttgaagaggttcactattccctagcatattgcgaaaaactcattgagttaaatttgagttggtgtacaaagcttaggagatttccatatattaacatggaatctcttgaatctctggatctacaatattgctatggtataatggtgtttccagaaatcatcggaacgatgaagccggagttaatgattctctcagcaaacactatgataactgaactaccatcatctcttcagtacccaactcatctcacagagctagatttgagtggcatggaaaaccttgaagctcttccaagcagcattgtcaagttgaaagatttggtgaagctaaatgtgtcgtactgcttaacgcttaaaagcttgcctgaagagattggtgatttagaaaacttggaggaacttgatgcttcgcgtactctaatttcacagcctccatcttccattgtccgcttgaacaagcttaaatccttgaagttaatgaaacgaaacacattaacagatgatgtgtgctttgtgtttcctcctgtgaataacgggttactctcattggaaattctggagctcggttcctccaatttcgaagatggaagaattccggaagatattggatgtttatcctctttgaaagagttacgtctcgagggagataatttcaatcatttgcctcaaagcatagcccaacttggtgcacttcgattcttatacataaaagattgcaggagtcttacaagtctgccagaatttccaccgcaattagatacaatatttgcagattggagcaatgatttgatctgtaagtcactgtttctaaatatctcatcattccaacataacatctctgcttcagattcgttgtcgttaagagtgtttacgagtttggggagtagtatcccaatctggttccaccatcagggaacagatacaagtgtttcagtcaatttgcctgaaaactggtatgtatcagataacttcttgggattcgctgtatgttactatggcaatttaactgagaacacagctgaattgattatgagttctgcagggatgccatgtatcacctggaaacttttgttatcgaatcattcagaatgtacatatattaggattcattttttcttggtaccttttgctggcttatgggatacatctaacgccaatggtaaaacaccaaatgactataagcacattatgttatcttttcctcaagaattgaaggagtgtggagttcgtttgttctatgaagatgaatctgtgcttgagaccaccaatgatgaacttaccattggggtaaggaggatcagatacgacgacgacgatagtgaacattatgaggaggctggttgttcctcttctaagaaacaaagatcataa

SEQ ID NO: 402 - DNA, 2718 bp, Zea mays
  source 1..2718: mol_type = genomic DNA
atggcagagattgctgttcttctcgtcctgaagaagattgccatagctctggcaggagagaccctaagttttgctaaaccattgcttgcaaagaagtctgagtcggtggcagcactcccagatgacatgaaactgattagtaatgagctcgagcttatccgggcgtttctcaaggaaatcggcaggaaaggctggaaaagcgaagtgatagaaacatggatagggcaggtccgaagactggcttatgatatggaagacactgtagaccattttatttacgttgttggtacacacgatcagatgggatcatgctgggattacatgaagaagatagccaagaagcctcggcgtctggtttcactagatgaaattgctagtgagattaagaagataaagcaagagcttaaacaactctcggaaagtagagaccgctggactaaacccttggatggcgggagtggtatacctgcaggaagctatgaaactgaaaaggaaatgtatcttcctggacatgattacacaatcagcgacgaggagcttgcaggaattgatgaaaataagcaaaccttgattagttcattaaaatttgaagatccatcacttcggatcattgctgtctggggtatgggtggcgttggaaaaagcactcttgtaaataatgtgtacaaaaatgaaggatccaactttgactgccgtgcatgggtttctatctctcagtcatatagactagaagatatatggaagaaaatgctgacagatctcatcgggaaagataagatagaatttgatcttggaacaatggatagtgcagaactaagagagcaattgacaaaaactctagacaaaaggcagtacctgatcatactggatgatgtctggatggctaatgttttttttaaaattaaagaagttcttgtagataatggccttggaagcagagtaataatcacaacaagaattgaggaggtagcttcactagctaagggtagttgtaagatcaaagtagaacctctgggtgtcgatgattcctggcatgtattttgtaggaaggcatttctgaaagatgaaaaccatatctgccctccagagttgcgtcagtgtggtataaacattgtggagaaatgtgatggtttgccattagcccttgtggcaataggaagcatattgtcgctgagaccgaagaatgttgacgagtggaagctattttatgaccagcttatctgggagctacacaacaatgagaaccttaatcgcgtggagaaaattatgaatctaagttataaatacttaccagactatttgaagaactgcttcctgtattgtgctatgtttccagaagactatctaatacacagaaagagattgattagattgtggatagctgaaggatttattgaacaaaaaggggcatgcagcttagaagacactgctgaaagttatcttaaagaacttatacgacggagcatgcttcacgttgcagagaggaactgctttggtaggattaaatgtattcgaatgcatgatcttgtgcgtgaacttgccattttccaatctaaaagagagggtttcagtacaacttatggtggaaataatgaagcagtgctagtgggatcatattctcgacgagtggctgtgctccaatgcagcaagggcattccatcaaccattgatccatccaggcttcgcaccttaattacattcgacaccagcagagcattatctgtgtggtattcttctatttcctccaaaccaaagtaccttgcagtattagacttatcaagcttgcctattgagactattccaaattcaattggagagcttttcaaccttaggcttttatgcctcaataaaaccaaagtgaaagagctccctaaatctattacaaaacttcaaaacctacagacaatgagtcttgagaatggggagttagtgaagttcccacaagggttttcaaaactgaagaaattgcgacatcttatggtttcacggttgcaagatgtaactttcagcggtttcaaaagttgggaagctgtggagccatttaagggcttgtggactttgattgaactgcaaactctgtatgccattacagcaagtgaagtattagttgcaaaacttggaaatttatcccagctgaggcggcttataatttgtgatgtaaggagtaacttatgtgcacagttgtgtggctctttgtcaaagttgtgccagctgtcacgattaacgataagagcatgcaatgaagatgaagtgctacagctggatcatttgacatttccaaatcctcttcaaacccttagtttagatggacgactgtcagaaggaactttcaaatctccctttttcttaaatcatggaaatgggcttcttaggctaatgttgttttacagtcagctttcagaaaatccagtaccacacctctctgaattgtcaaacttgactaggttatcccttataaaggcatacaccggccaagaattatacttccaagcaggttggttcctgaatttaaaagaactttacttgaagaatttgtcccggctcaatcaaatagacatacaggagggagctttggccagccttgaacgtataacaatgaaacacctcccggagctacgggaggttccagtcggtttcagatttctcaagtccctaaaaacaatatttttttccgatatgcatcctgagtttgaaagcagctttcaaaaggaaatgtag

SEQ ID NO: 403 - DNA, 1005 bp, Oryza sativa
  source 1..1005: mol_type = genomic DNA
acattggtagtagtgcaatgtcagagcttcaatcactgccagacctcaatagactatcactagtgaaccttgaaaaggtttcagacactgaagatgcaagaatggcaaaacttcaagagaaagaaaagctcgagacattgatgttgaggtggaatatggatgctggaaatgccagtagaatagatcatgaagtacttgaaaccctccaacctagccagtgcctgaaaactttggagattgttgcgtatgaaggatatgtatttccatcttggatgacaagaaccgagccatatcttacatctctggttgagataagactagttaatatgagagcatgtgaaaaggcattacctccacttgggatactaccatgtctgaagattgcagagataagtggagttgataatctcagttctattggtgataatttctatggtcataacggcacattcccttcactggagaagctgattctatcatacatgacaagccttgaagtctgggaacagtcatctaggatgaatctgtttcctcgtcttgcagaacttgtcatcattcagtgcccaaaattgagagcactgcatatggagtttccatcgattgaaaagttgattttgtggatgaataacaagatgttgtacagctcgaaggaaggtatgagaggtgtagagaagagcctcgaaaatctttcaatttctttctgtgaagagttgcatgcttcttcaggctgtgagggtctacaggctcttgatcgcctcaagaagttggagatatgtggttgtcatgaattatcatgcctcccacagggtttgcagcatctttcctctctcaccagcttgaaaattgataactgcaacaaattggagattttgccagaatggttggagaacctaccttttctacagataatgtgtttgtctggctgtccaattctgcactccattcctgaaggcctaacatgtagcgacattattgttgaagattgccccaattttaaagaaccat

SEQ ID NO: 404 - DNA, 3102 bp, Oryza sativa
  source 1..3102: mol_type = genomic DNA
atggcggagacggtgctgagcatggcgaggtcgctggtgggcagtgccatcagcaaggccgcctctgccgctgccaatgagacgagcctcctgctgggcgtcgagaaagacatctggtatatcaaagatgagctaaaaacgatgcaagcattccttagagctgctgaacttatgaaaaagaaagatgaactattaaaggtttgggcagagcaaatacgtgacctgtcatatgacattgaagattcccttgatgaatttaaggtccatattgaaagccaaaccctatttcgtcagttggtgaaactcagagaacgccaccgaattgctatccgtatccacaaccttaaatcaagagttgaagaagtgagtagcaggaacacacgctacagtttagtcaagcctatttcctctggcacagagattgacatggattcctatgcagaagacattcgtaatcagtcagctcgcaatgtggatgaagctgagcttgttgggttttctgactccaagaaaaggctgcttgaaatgatcgataccaatgctaatgatggtccggccaaggtaatctgtgttgttgggatgggtggtttaggcaagacagctctttcgaggaagatctttgaaagcgaagaagacattaggaagaacttcccttgcaatgcttggattacagtgtcacaatcatttcacaggattgagctacttaaagatatgatacgccaacttcttggccccagttctctggatcaactcttgcaagaattgcaagggaaggtggtggtgcaagtacatcatctttctgagtacctgatagaagagctcaaggagaagaggtactttgttgttctagatgatctatggattttacatgattggaattggataaatgaaattgcatttcctaagaacaataagaagggcagtcgaatagtaataaccactcggaatgttgatcttgcggagaagtgtgccacagcctcactggtgtaccaccttgatttcttgcagatgaacgatgccataacattgctactgagaaaaacaaataaaaatcatgaagacatggaatcaaataaaaatatgcaaaagatggttgaacgaattgtaaataaatgtggtcgtctaccattagcaatacttacaataggagctgtgcttgcaactaaacaggtgtcagaatgggagaaattctatgaacaccttccttcagaactagaaataaacccaagcctggaagctttgaggagaatggtgaccctaggttacaaccacctaccatcccatttgaaaccatgctttttgtatctaagtatctttcctgaggattttgaaatcaaaaggaatcgtctagtaggtagatggatagcagaagggtttgttagaccaaaggttgggatgacgactaaggatgtcggagaaagttactttaatgagctaatcaaccgaagtatgattcaacgatcaagagtgggcatagcaggaaaaattaagacttgtcgaattcatgatatcatccgtgatatcacagtttcaatctcgagacaggaaaattttgtattattaccaatgggagatggctctgatttagttcaggaaaacactcgccacatagcattccatgggagtatgtcctgcaaaactggattggattggagcattattcgatcattagctatttttggtgacagacccaagagtctagcacatgcagtttgtccagatcaattgaggatgttacgggtcttggatcttgaagatgtgacattcttaatcactcaaaaagatttcgaccgtattgcattgttgtgccacttgaaatacttgagtattggatattcgtcatccatatattcacttcccagatccattggtaaactacagggcctacaaactttgaacatgccgagcacatacattgcagcactaccaagtgagatcagtaaactccaatgtctgcatactcttcgttgtataggacagtttcattatgacaactttagtctaaaccacccaatgaagtgcataactaacacaatatgcctgcctaaagtattcacacctttagttagtcgcgatgatcgtgcaaaacaaattgctgaattgcacatggccaccaaaagttgctggtctgaatcaatcggtgtgaaggtacccaaaggaatagataagttgcgagacttgcaggttctagagtatgtagatatcaggcggaccagtagtagagcaatcaaagagctggggcagttaagcaagctgaggaaattaggtgtgacaacaaacgggtcgacaaaggaaaaatgtaagatactttatgcagccattgagaagctctcttccctccaatctctccatgtggatgctgtgttattctcaggtattattggaacacttgagtgcctagattctatttcatctcctcctcccctactgaggacactcgtgttggatggaattcttgaggagatgcctaactggattgagcagctcatgcacctgaagaagatctacttattgagcagcaaactaaaggaaggtaaaaccatgctgatacttggggcactgcccaacctcatggtccttcatctttatcggaatgcttaccttggggagaagctagtattcaaaacaggagcattcccaaatcttagaacactttggatttatgaattggatcagctaagagagatcagatttgaggacggcagctcacccctgttggaaaagatagaaataggcgagtgcaggttggaatctgggattactggtatcattcaccttccaaagctcaaggagattccgattagatacggaagtaaagtggctgggcttggtcagctggagggagaagtgaacgcacacccaaatcgccccgtgctgctaatgtacagtgaccgaaggtatcacgacctgggggctgaagccgaaggatcttctatagaagtgcaaacagcagatcctgttcctgatgccgaaggatcagtcactgtagcagtggaatcaacggatccccttcccgagcaggaggagagagctcgcagtcgcaggtgatcacgttgacgacgaatgatagcgaagaagataggcacagctcaagctggctga

SEQ ID NO: 405 - DNA, 4288 bp, Oryza sativa
  source 1..4288: mol_type = genomic DNA
caccgagtgtgagcggcaacggcggtcagggagcaggcgtggctcgtcggcgagcggctacgggcaacggcgccttggcgtcaggcatccgccgtcactcacctcaagcttgcgggctctgcgaccaccctctcatagtcataggccacagaagcacatttgccttgtgcgtgctgttcgtctgttccactcgtgaacatcagacgcgaagattatagattcacccctgttcacagattcaggtctgtcacgaggcgtatgatcatcaactctgccacaaaatccattcaaaaatagaacagagcaatggaggcgacggcgctgagtgtgggcaaatccgtgctgaatggagcgcttggctacgcaaaatctgcatttgctgaggaggtggccttgcagcttggtatccagaaagaccacacatttgttgcagatgagcttgagatgatgaggtctttcatgatggaggcgcacgaggagcaagataacagcaaggtggtcaagacttgggtgaagcaagtccgtgacactgcctatgatgttgaggacagcctccaggatttcgctgttcatcttaagaggccatcctggtggcgatttcctcgtacgctgctcgagcggcaccgtgtggccaagcagatgaaggagcttaggaacaaggtcgaggatgtcagccagaggaatgtgcggtaccacctcatcaagggctctgccaaggccaccatcaattccactgagcaatctagcgttattgctacagccatattcggcattgacgatgcaaggcgtgccgcaaagcaggacaatcagagagtggatcttgtccaactaatcaacagtgaggatcaggacctaaaagtgatcgcggtctggggaacaagtggtgatatgggccaaacaacaataatcaggatggcttatgagaacccagatgtccaaatcagattcccatgccgtgcatgggtaagggtgatgcatcctttcagtccaagagactttgtccagagcttggtgaatcagcttcatgcaacccaaggggttgaagctctgttggagaaagagaagacagaacaagatttagctaagaaattcaatggatgtgtgaatgataggaagtgtctaattgtgcttaatgacctatccaccattgaagagtgggaccagattaagaaatgcttccaaaaatgcaggaaaggaagccgaatcatagtgtcaagcactcaagttgaagttgcaagcttatgtgctgggcaagaaagccaagcctcagagctaaagcaattgtctgctgatcagaccctttacgcattctacgacaagggttcccaaattatagaggattcagtgaagccagtgtctatctcggatgtggccatcacaagtacaaacaatcatacagtggcccatggtgagattatagatgatcaatcaatggatgctgatgagaagaaggtggctagaaagagtcttactcgcattaggacaagtgttggtgcttcggaggaatcacaacttattgggcgagagaaagaaatatctgaaataacacacttaattttaaacaatgatagccagcaggttcaggtgatctctgtgtggggaatgggtggccttggaaaaaccaccctagtaagcggtgtttatcaaagcccaaggctgagtgataagtttgacaagtatgtttttgtcacaatcatgcgtcctttcattcttgtagagctccttaggagtttggctgagcaactacataaaggatcttctaagaaggaagaactgttagaaaatagagtcagcagtaagaaatcactagcatcgatggaggataccgagttgactgggcagttgaaaaggcttttagaaaagaaaagttgcttgattgttctagatgatttctcagatacctcagaatgggaccagataaaaccaacgttattccccctgttggaaaagacaagccgaataattgtgactacaagaaaagagaatattgccaaccattgctcagggaaaaatggaaatgtgcacaaccttaaagttcttaaacataatgatgcattgtgcctcttgagtgagaaggtatttgaggaggctacatatttggatgatcagaacaatccagagttggttaaagaagcaaaacaaatcctaaagaagtgcgatggactgccccttgcaatagttgtcataggtggattcttggcaaaccgaccaaagaccccagaagagtggagaaaattgaacgagaatatcaatgctgagttggaaatgaatccagagcttggaatgataagaaccgtccttgaaaaaagctatgatggtttaccataccatctcaagtcatgttttttatatctgtccattttccctgaagaccagatcattagtcgaaggcgtttggtgcatcgttgggcagcagaaggttactcaactgcagcacatgggaaatctgccattgaaatagctaacggctacttcatggaactcaagaatagaagcatgattttaccattccagcaatcaggtagcagcaggaaatcaattgactcttgcaaagtccatgatctcatgcgtgacatcgccatctcaaagtcaacggaggaaaaccttgtttttagggtggaggaaggctgcagcgcgtacatacatggtgcaattcgtcatcttgctataagtagcaactggaagggagataagagtgaattcgagggcatagtggacctgtcccgaatacgatcgttatctctgtttggggattggaagccattttttgtttatggcaagatgaggtttatacgagtgcttgactttgaagggactagaggtctagaatatcatcaccttgatcagatttggaagcttaatcacctaaaattcctttctctacgaggatgctatcgtattgatctactgccagatttactgggcaacctgaggcaactccagatgctagacatcagaggtacatatgtaaaggctttgccaaaaaccatcatcaagcttcagaagctacagtacattcatgctgggcgcaaaacagactatgtatgggaggaaaagcatagtttaatgcagaggtgtcgtaaggtgggatgtatatgtgcaacatgttgcctccctcttctttgcgaaatgtatggccctctccataaggccctagcccggcgtgatgcgtggactttcgcttgctgcgtgaaattcccatctatcatgacgggagtacatgaagaggaaggcgctatggtgccaagtgggattagaaaactgaaagacttgcacacactaaggaacataaatgtcggaaggggaaatgccatcctacgagatatcggaatgctcacaggattacacaagttaggagtggctggcatcaacaagaagaatggacgagcgtttcgcttggccatttccaacctcaacaagctggaatcactgtctgtgagttcagcagggatgccgggcttgtgtggttgcttggatgatatatcctcgcctccggaaaacctacagagcctcaagctgtacggcagtttgaaaacgttgccggaatggatcaaggagctccagcatctcgtgaagttaaaactagtgagtactaggctattggagcacgacgttgctatggaattccttggggaactaccgaaggtggaaattctagttatttcaccgtttaagagtgaagaaattcatttcaagcctccgcagactgggactgcttttgtaagcctcagggtgctcaagcttgcaggattatggggcatcaaatcagtgaagtttgaggaaggaacaatgcccaaacttgagaggctgcaggtccaagggcgaatagaaaatgaaattggcttttctgggttagagtttctccaaaacatcaacgaagtccagctcagtgtttggtttcccacggatcatgataggataagagccgcgcgcgccgcgggcgctgattatgagactgcctgggaggaagaggtacaggaagcaaggcgcaagggaggtgaactgaagaggaaaatccgagaacagcttgctcggaatccaaaccaacccatcattacctgagctcctttggagttactttgccgtgctccatactatcctacaagtgagatcctctgcagtactgcatgctcactgacatgtggacccgaggggctgtggggcccacatgtcagtgagcagtactgtgcagtactgcagaggacctgcatccactatcctatattataatggattgtactatcgatccaactattcagattaactctatactagtgaacttattttt

SEQ ID NO: 406 - DNA, 11516 bp, Oryza sativa
  source 1..11516: mol_type = genomic DNA
aagcttgaaagtgtgtgaagaaatgaagaaagtgaagtctacttataggacaggtataacggttatgagaagtggaaatgtccgaactgccccgcaaccgccatcagggagtgatctggagcgtccacgccaaaccccaggatcaacggtgatcaccagggttcggctgaacctgggctgggccagatggcttccaaacctagtctgggtctcctcctcgacctgccttatccaattcttgcaattttgggatgtttctttagtagtttaaaagcccattcttgcattgatagatttctccttcacttttagtctggatttcctcccaacttctgggtttatcacctgcataaaaatatacatcaacaattgtggaatatgtgagttttaacacctatcactatgttggatattttattatctggactttatgcagacgttgacggtatagatttggcatttaacagtcgccaacattatacaatcgggtaaatagtattgatgtattccatgaatctgtgtatagaaggtatgccatatccttgacactgacaccatatgtgtttccgtttttgagaaaacatttccatttccaaaaatttctgaccaacactctctatttccgaaaactcatctgaaatccgaaaacttttcaaaccgttttcatcccagtaatgaatggcaggctctacgtgcagacccacaaatgctccacaaagatctcaaaaaatttatcgtataaatttcatacgtagactaaatttcacaaaaattcacttgtgtacccattgaggtatgtattttgttttcaaaaaaaaacacagtttaccttgtggtgctcgggacatcggccggagctcatgatcataatggagtcagtcagggtggctactggagcttatggcggaggaggtcagggtggtgggacgtggggcagagtttagtccggtcggcaaccagagctccgagaggagatctgggcagtagtgagagaagggtcaggaggcgccagagtggccacgacggaggctgggaaagcgatgccgaacagcaaagcatgcgttgaagtaggcggggtggcagcagcctcggggcggagcgggcatggaacaagggtagagctggagtcggtggccggctactgagaccattcacagtgcgtcaccaagttttgatattcttcacatgccacgtagatcagagcggtattagccacatgttacatagtgcaaaactctacaagaccacatatgggttgcttgtagtgggtcccactaataccacttttacacttctctttttacttttcccctctcctctctcccctctcttcctttccccaccggccaccgcagagagccgggcggagacggaggttgcgggggtcgggcggagcggcggctcaagcggaggtcgtggaggcgagcaggagacggcgccgggccgagtggcgacggcggtggggcctagcaccgtgcctcccctcctcctcctcctctagtggtggcgaatcgaggaagccgccgccgccgcgccccacctcttcatctgatgcgggcgggaagctgccgccaccgccgtcgggcagatccagatctccggcctccgtgtcgggcggctacgcggcggcgggcgtcggcgtcggtcagcgccctcctcacctggccagcccaccgactagccctaccgtcgtcatcatccctggtcagcaccctcctcccctggcattcggctgcctcacccctctcctctctctcctctagcggtggtgtgggtcccacctgtgggtccctctgagacgaagaacgcgtagtcaactttggctacgcgcggagctgaggaacgcacacgattggataaagtggcaaaggaatatttgcttttttggttgaggctaaatgctacgtagatctactgtgaatggcctgatggcgcagcggctctcttgcgggacagagtgggacgtgcacgacgagaaatttcctcttgcatgaataacccacggatgtaggcctccttaactaggagctacgaggtgggatttgggaggctttttctatttcaaggcttaaagcctatccaatatgatctctaatcttaaaatttagtgtttatttttgaaaaaaagttggctccaataattttcctaattagcttccaaaaattggaatcttactccctatccttctcgctctccactagtggagaagcgtgctagttcttaacacacgcatgggtggagggatcacatggatattatggaaatatcctcatggactggtgattaacatagtcctactaggagagaattgagtttattctatatcgttatcgacgtttggtatcacgactacgttatttggatggtatggggatcatcggtactagagtatatgcgagattgaggtaaaagagatggagacagatatttttatactggttcgccccttatctaacaggtaatagccctacatcctgttggctaaagccggtattgctcttattcatctgaatcgcacaagtataatatttaggataacctgtctagctgtcatcgacttggcggcatggataaccaactcgtagtcgatgacggggtagtatttctcttcgaatatgaactcgtcgagatcagagatggctctagatctctcttgccggtctcaggaggcaccagatggggtatgcctaggctaatctctaatgtcgatatttagcggcgtattggcttgtgtgtatgttatgtgttgtggctcgtcatctctcctcctagggggcttgtatttatacccatagatgcccccttgtctaagtagaactagggagataaatatggatacgatccgagtagtccttgtcgtttccatatagaactctttttgtcctttcttatccgaaactccttttatatacgaggtatgattccatataagacatggtatatggtgggccctgccgagcttagtcaggaatgtggtatccacaaccctgacaatcatgcagggttcattgtctccgagttctacgcggagactaagacaactcaaggtataaaaggcgcactctctaaggggttcaaaagagcaaatcatagcacgaacacacccaccatagtttacgaagccagaggctgtgaagcctactcgccaggagatcttgtcgactcatctcgacaaggatctcgccggtaacgctggattcatctcttctctttgtactccgtggtttccatatcaatctcatataaactggattatggttattatcttacgaggggtctaaaccagtataatctttgtctctctgattgttttaatatcgtatcatgtagatcctcataccaacttaccctaatacactatttatccgatctacaggtatcccctatcgacaataggtatataagatattataaaaaagatggagacatatgtgagctgatgatttaggctgcattcgttgcagcttctttccaacccatctccctcgttttccgtgcgcatgcttttcaaactgctaaacggtgcgttttttacaaaaagtttatatacgaaagttgcttaaaaaaatcatattgatccattttttaaaaagatagcaaaaaattaagtaatcacacgctaatggactactctgttttccgtgccggaggatagctttcccaacccagggaaacgaacccaaccttaggtgtgttcattgctaggtgttcccaacccctctcccttatattccgtgcgcatgcttttcaaactgttaaacggtgtgtctctttttaaaaaatttctatacgaaagttgctaaaaaaatcatatcaatacatttttgaaaaaaaaagctaatacttaattaatcacgtacgtactaatagaccgcttcgttttctatgcgcagaagatttgttcccaacccccacaacaaacacagccttaacatgcttgcatttaaaaagctataaaatttaataaattataaaattatagataatataacatgcttacttgatgtgacactttacctgttaagttttaggagtcggtgtttagattcaaactttttttttcaaacttccaacttttccatcagatcaaatgtttgggcacatgcattcagcaataaatgtggacaaaaaaaaaccagttgtacagtttgcatgtaaatcacgagatgaatcttttgagcctaattacgtcatgatttgacaatgtggtgctaaagtaaatatttactaatgacagattaattaggtttaatagatttgtctcgcagtttacaggcgaaatatataattttttttgttattagtttatatttaatacttaaaatgtatgtccatatacttaaaaaaattttgtaccacgaactaaacacagccaagtggactctaactctctctctctctatatatatatatatatatatatagtaatgtgttcgtatgtcctggatagaaactcatttcctccgcatagaaaacggagcggtctattaatacgtgattaattaagtattagctatttttttcgaaaataaattaatttaattttttaaataacatttatatagaaactttttaaaaaacacgttgattaaccatttgaaaagcgtgcgtgcacgcggcgtgaaaaatgaggcagagatgttgtgaaaaggagtgccgaacacagtcaaagcctcaggtggtgtttggatccagggacttaacttaaactttagtccctatatttagacactaatttatagtattaaatatagactacttataaaactaattacataaatgaaagctaattcacgagacaatttttttaagcctaattaatccataattaaagaatgtttactgtagcatcacataggctaatcatggattaattagacttaatagattcatctcgtgaattagtccaagattatagatgggctttattaatagtctacgtttaatatttataattaattttcaatccaatatgataggacttaaaatttagtcccatctacagggtcagaggattcggtcggtctcagggcagtcctctccgtataacgcagcgcccgatattttttatgggcataaatagtctgattgctactgtagcattttgttcaactaactccccaatgggcaatggctagtcgtcgagtgtcagtagtcaagagtagactccgcttcgcttcgccgtaccttctctcttctcgttctcctatttcacaaatcacaaccggattgctttcttccttcctccggtctggtccccaacctccgcggcagccatggttggcgccgagatgcttgtggccgcggcggtgagccaggtcgcccggaagatcaacgacatcgtgggggtcgcgcagggcgaggtgaagctgtgctgcaatttcagcgacgatttggagggcatcaaggatacccttgtgtacctggaaaccttgctgaaaaatgcggagaataactccttcggaagcgacagggccaacctgcgccactggcttggccagatcaagtccctggcttacgatatcgaagatatcgttgatgggtactactcttccaaggagcagttcgatgggggcagctatgcacagaaggtaacagaatctcattcctttttcttcatcggtaaaatttcttcaatttcaactcaattttagaatgccccgcaaaaaaaaaatcaattttagaatggatctacattaatgagatgtagaggtgtattactatgggcaggggaagcaccgtgtgtgcatccttagttactgcataggcaataagttatcctttccattgtccaaaaaaattttgaagcaaggaggaaaagcttgaagcttagtcttttagttttttctttttgattattttgttatttatctcagttatgagattaggagtgtatatgcactcgtgtagcttttgtctgtgtgtggatatagaggctggatttctatccattatcttaaataaattgtccaagaaatttatcaggggaaatgcagttagatgcaccattagaattgcttcattgcctgtggaagagtggaacagctctgagaattgtgattatgttttatatatttaaacaatattgattactagtactagatttactctctttttttttccttatgaaattccttgatactggtagtagtgagagataaacctaataattacatgccacatacctgtagattgtactatacttcaacacccttttgcaaatagtgagagataaacctaatacttacttacatgccacatcgtcagagcactcaattcttttttgttttggtaagcaatcagcttttgcctttacatagacaaaaattgatcgacgaatattttgaaaaaaaaaacctttgtatttatatggaaaagaaaatgcaaggtactttaccaaacaattgtgcatctatgatctatctgctatgtaggggttgataccggccttggttccttgctgcaccaactgttatttacctatctccatttttgttcttccagcaacaatagtatcaaaatactaaatgtctttcctgactaaggctaccttcataaatttacaggggtcattattctgctcgctatccaatccaatgcttctgaaaggtagcatggtttataagatgaaatccaagagagagatgctacagcaaagccaacagttgcccaatcagtatcatttcctttcatatatcaattcagctgtgcattattttgaggagaagcaaacaacatcatacagaaatactgacattgcaattgtcgggagggatgctgatttggatcatctcatggatcttttaatgcaaaacagcgctgaagagctttgtattatacccatagttgggcctgtaggttttggaaagacaagccttgcacagttagttttcaatgatacaagaacagaggtattcagctttaggatatgggttcatgtttccatgggtaatatcaaccttgaaaaaattgggagagatatagtttcacaaactacagaaaaaattgagggaaatatgcagctgcagtcaatcaagaatgctgttcagcgtgtgctaaataaatatagttgcttgatcataatagacagcctttggggaaaggatgaagaagtgaatgaattgaagcagatgttgcttacaggtagacacacagaaagcaagatcatagtgaccactcatagcaataaagtagctaagctgatttccaccgttccactgtacaagttggcagctttatctgaggatgattgtttaaaaatattctctcaaagggcaatgacaggtccgggtgacccgttgttcagggaatatggagaagaaatcgttagaaggtgtgaaggcacacccttggtagccaattttctcggttctgtggtgaatgctcaacgacaaaggcgtgagatttggcaagctgcaaaggatgaagaaatgtggaagatagaggaagattatccccaagacaaaatttcaccactatttccatcattcaagataatatattataatatgccccatgagctaagattatgctttgtatattgttcaatcttccctaaaggaactgttatagaaaagaagaaacttattcagcaatggattgcacttgacatgattgagtccaaacatggaaccttgccacttgatgtaactgcggagaaatatattgatgaacttaaagcaatctatttccttcaagttttagagcggtctcaggtaagttcatgggttgctttttaccttctgtacatatcctatgtaactagaatgtggttaaatatctccattaagcatagtagcttataccattgttttatttctaaattctcaataagtttctgtaagaagattgaccatgatagaatggccaatagtgatatctcaacaaacaagtaacactgttttcctccacagaatgatgcagaaagatccagtgcttctgaggaaatgcttcgcatgcataacttggctcatgatcttgctagatcggttgctggtgaagatatccttgttattttagatgccgagaatgagcgcaatgccagatattgcaattaccgttatgcacaggtgtctgcttctagtttagagtcaatcgatcgcaaggcatggccttccaaggcaaggtcactaattttcaagaatagtggtgtggactttgagcatgtcagtgaagttctttcagtgaacaaatacctgcgtgttttggatctcagtggatgttgtgttcaagatattccatctcctatctttcagctgaaacaattgagatacctcgacgtttcatctttatctattacagcactccctctgcaaattagtagctttcataagttacaaatgttggatctttcagaaactgaactaacagagttgccaccctttataagcaacttaaaaggactgaattatttgaatctccaaggttgccagaaacttcaacgattgaatagccttcatttgttgcatgatctacattacctaaacttgtcatgctgccctgaagttactagttttcctgaatctattgaaaatctgaccaaactccgtttcttgaatctttctggatgctctaagctttcaacattacctatcagatttttggaatcatttgctagcctctgttctttggtagatcttaacttaagtggctttgaattccaaatgttgcccgacttttttggcaacatatattcacttcagtatttaaatctgtcaaaatgtttgaaacttgaggtattaccacaatcttttggccaacttgcatatctgaaaagcctaaatctttcatattgttctgatcttaaactgctggaatcctttgaatgccttacctctcttcggtttttgaatctctcgaactgctctaggcttgaatatttgccatcatgctttgacaagcttaataatttagagtctctgaatttatcacaatgtcttggacttaaagcactacctgaatcacttcaaaaccttaaaaatcttcagcttgatgtttctgggtgtcaggattgtatagtacaatccttttctctaagtaccagaagttcccagtcctgccaacggtcggagaaagctgagcaggtcagatcaagaaacagtgaaatttcagagatcacttatgaggaacctgctgagattgaacttttaaagaataatccaagtaaagatttggcctccatctcacacctaaatgaggatagaattgaggagcctgaagttgtcactgaggtaaacttacattttattaaagaaataaaaacaatttgcctagtgtttcctttgaaatttccttatgtcaatacttaatttatctttgatagatttgagttactggtgattgagaaagttgtatgccaatttgaaccagtttctcactaccaactgaaaatgatgacgaacggaaactttattgtagttgtgctcgaattgaagatcccttttctaatgaggtgatctaattgggtaccagaacatgaatcatacttttttcagtagttcttaacatttcgtagagaaaatacatgagtgttccttcaattaaaaaactccctagaggccagcaagttataaatttaaatgggattctccttattacctagatttatgttttcagaaaattttgtaatatcatactaactaattgtccatgtccttgtttcttgatgtagccaagtgcaactagaggtatggtacaacagattccaggaaaccagctctcatcgccttcatctcatctttcttcctttgcatcaagctcagcgccatttgcatcctcctcttcggacacctcaacaagtgagcatccagtgcctaatgaagaggcggcaggtatggtacttcaaataattttctcccgatttaatcatctcaagatgaggttcacttctttatttgaatataccattataaggaaatagatcatgcgccctcttgtttaaaggaatttgatgtttttttatattcgctctctttgagatatacctgtcatccagcagtggtaaaaaggatagtatatagctgacaaatatgttcatataatttccttgtgggtaattttgatattctctttctatcttaatacgtgttatgagcaccggctaatgaccgaatggggtatgaatggaacaccggaggtcgaggcttttggcagcctcttcgacgtctggcccatgatcggcgacgaaagcaaaagcaggggatgagagagtagagaattggagacgagactatagattgaatcttgcttggttcattcatgatttcgtggcccttaattaggcttacgattgaactgaattagctaataaaaaaggataacaaagtcttctctaaatgtaagcaatcggatcactatcgctcgtccggcatgccgcgtcagttttcagctcgcgtgatctccttcgacgccgcttggaccggttgctgcatccgcgtagttgcgtttcttcatgtagacgattccgaccctttacattacaactacttggaattctttgagtgttctaaaataatttggatagtggtacatatgtggttacattttcttaatggtgacatatagccaagttggactaagattaattttaatttgtgtggaatgagaaagagtcaagacagtttgatacgtagaagtttgcatattcagaaccttatactggtttgtcttggtttattttcttgacaatgcagctttgacagttcctcggtccaaagagaaatgcgacaacactcccatgccggtaaaagatggcctgatatctgaagatgatgcaccggtacatctgcatcagaagcccctgcaggcgacagccatggcagccatatgactgacctgtaatcctacaagaaaccaactgaagattcatatgtggactgagtgaaattatgaaagttattggaataaattgttgctctgtatgtgagagcaagcttcagtccgttagcctggttccttttagtagtgttctactattgggagatcttcatcaacattttacatgaaacgtgatgtaatgaacctctgttaattgttaattgtcagagctctagttttttgtggtataaattttgttgcaagggggcaatgcactcaacttttgaatcatttgattggtatggaaatcattgcatttgtgcagagttcaggcagagttcagttcttgcatttgcacatcgtattactattacctggccttgtttggcacatctccagttccagctccacctctcctagagctggagctcagccaaacagtttcagctccaccgaaaatgggagcggagctgggtggagcactctaacaaaatgaactagagaggtggagctaggttaagctgttccacaactccacttcagatctaactcctaaagttaaatttaaaagttgaagctctaccaaacgagaaaacggacgatatgccactgtataggttgggttcgaatgaaatgccactcaatacaatgtatcggataaaatgccactcaatacgttgcctattggatgaaatgccac

SEQ ID NO: 407 - protein, 1388 aa, Malus X robusta
MGGEAFLVAFLQVLVDKLAHREVFKYFGLVKGVDQKLKKWSATLSAIGAVLNDAEERQLTAKNNTLKLWLEDLRDLAFDVEDVLDKYATKMLKRQIQHAHSRTTSKLWNSIPDGVFNFNMNSEIQKISERLQEISEQKDQLNLKIDTGALTTRARRNISPSSSQPDGPVIGRDEDKRKIVELLSKQEHRTVNFDVVAIVGMAGVGKTTLAGQVLNDMVATQTFQPAVWACVSDDFNLERVTKQILESITSRQCTTEDYNKVQDYLHKELAGKKFLIVLDDVWKTCSYGEWMKLQSPFRDGAQGSKIIVTTRDTDVSKMMGAATLVHNLEPMESSVCLQVFEQHAFLNSNDDKPPNYELLKEKIAAKCRGLPLAARTLGGVLLRKDTYEWEDILNNKLWSLSNEHDILPVLRLTYFYLPSHLKRCFAYCSILPNDYEFEEKQMILLWMAEGFILPRPEDKKQIEDLGADYFRDLVSRSLFQKSTKCISKYVMHDLIGDLARWAAGEICFRLEDKQNDDGEQLRCFPKARHSSYIRGLSDGVKRFEVFSELKYLRTFLPLRKDSFWNYLSRQVAFDLLPKLQYLRVLSFNCYKITELPDSIGDLRYLRYLDLSYTDITSLPKSTSTLYNLQTLILEGCSKLKALPIDMSNLVNLRHLNNSNVSLLEDMPPQLGRLVNLQSLTKFVVSGGGGGDRSGIRELEFLMHLRGTLCISRLENVTDVEDAQRANLNCKERLDSLVLEWSHSSDTRETESAVLDMLQPHTKLKELTIKSYAGKEFSSWVGVPLFSNMVLVRLEECNNCLSLPPLGKLPHLKELYIRGMNAVESVGAEFYGECSLPFPLLETLEFVDMQHWKVWLPFQTDHRGSVFPCLKTLLVRKCSKLEGKLPENLDSLASLEIVKCEELLVSIANYKQLRQLNIDGCKGVVHTAAKVEFELLESLYLSNISELTSLQTGELCRNGLNMVRDLKINGCEELTSSLKNEAILLQQLISLGRLEIEDNSLLVEELGKEADELLQLQILGCKLEFLKLKKCKNLLKLPEGLNQLSSLQELRIHECSSLVSFPDVGLPPSLKDIEITECHSLIYFAKSQIPQNLRRIQIRDCRSLRSLVDNEAVGSCSSSSHNCLEYLNIERCQSLTLLSLSDQLVRALRELDIYDCEQLEFLAPDGLFCNNTNYFLENFRIRRCQNLKSLPRLSGGIRGSNLREIRITDCDRLEALPEDMHNFNSLEKLIIDYREGLTCSFPANLTSLMIWKVKSCKSLWELEWGLHRLTSLRYLWIGGEDPDMVSFPPDMVRMETLLPKSLTELSIGGFPNLKKLSSKGFQFLTSLESLELWDCPKLASIPKEGLPLSLTELCIYGCPVLKERCQPGKGRYWHKISHIPYIDIDWKMI

SEQ ID NO: 408 - protein, 16 aa, synthetic construct
MWVLCLFCWPTYTHGS

SEQ ID NO: 409 - protein, 6 aa, synthetic construct
MHMYLK

SEQ ID NO: 410 - protein, 10 aa, synthetic construct
MSYKLHVVPW

SEQ ID NO: 411 - protein, 7 aa, synthetic construct
MSATPQV

SEQ ID NO: 412 - protein, 8 aa, synthetic construct
MRKHNWHI

SEQ ID NO: 413 - protein, 29 aa, synthetic construct
MRKHLQHTYILSFSLSLSLIPAQLCGRRE

SEQ ID NO: 414 - DNA, 66 bp, Dichanthelium oligosanthes
  source 1..66: mol_type = genomic DNA
aatttaactccgcctatgttgtctcaacatagccggtcccaagcccggataaaggaggagggggtt

SEQ ID NO: 415 - DNA, 61 bp, Solanum lycopersicum
  source 1..61: mol_type = genomic DNA
cttgtaactccgcctgtcaagtcacagccggtcccaagcccggaaaaaggaggagggcaag

SEQ ID NO: 416 - DNA, 52 bp, Sorghum bicolor
  source 1..52: mol_type = genomic DNA
tgcttaacactgccaatgccggtcccaagcccggataaaagtggagggggca

SEQ ID NO: 417 - DNA, 52 bp, Sorghum bicolor
  source 1..52: mol_type = genomic DNA
tgcctaacactgccaatgccggtcccaagcccggatagaagtggagggggca

SEQ ID NO: 418 - DNA, 52 bp, Sorghum bicolor
  source 1..52: mol_type = genomic DNA
tgcctaacactgccaatgccggtcccaagcccggataaaagtggagggggca

SEQ ID NO: 419 - DNA, 80 bp, Oryza sativa
  source 1..80: mol_type = genomic DNA
tatgtaactccgcctatgtcatcttaagtttatctaaatgatatagccggtcccaagcccggaaaaaggaggagggtata

SEQ ID NO: 420 - DNA, 43 bp, synthetic construct
  source 1..43: mol_type = other DNA
nnnnnnctgatgagtccgtgaggacgaaacgagtaagctcgtc

SEQ ID NO: 421 - DNA, 59 bp, synthetic construct
  source 1..59: mol_type = other DNA
acttgtccacaatcttttctgatgagtcgctgaaatgcgacgaaactcgatatgttcaa

SEQ ID NO: 422 - DNA, 171 bp, Bacillus subtilis
  source 1..171: mol_type = genomic DNA
cctataattatagcgcccgaactaagcgcccgaaaaaaggcttagttgacgaggatggaggttatcgaattttcggcggatgcctcccggctgattatgcagatcacagccgtaaggatttcttcaaaccaagggggtaactccttgaacaaagagaaatcacatgatctt

SEQ ID NO: 423 - DNA, 68 bp, Hepatitis delta virus
  source 1..68: mol_type = other DNA
ggccggcatggtcccagcctcctcgctggcgccggctgggcaacatgcttcggcatggcgaatgggac

SEQ ID NO: 424 - DNA, 186 bp, Otolemur garnettii
  source 1..186: mol_type = genomic DNA
ggcgctgtgtcgcaatctgcgaagggcgtcgtcggcccaagcggtagtaagcagggaactcacctccaatgaaacacattgtcgtagcagttgactactgttatgtgattggtagaggctaagtgacggtattggcgtaagccaataccgcagcacagcacaagcccgcttgcgagattacagcgc

SEQ ID NO: 425 - DNA, 52 bp, Chicory yellow mottle virus
  source 1..52: mol_type = other DNA
caacagcgaagcgcgccagggaaacacaccatgtgtggtatattatctggca

SEQ ID NO: 426 - DNA, 52 bp, Arabis mosaic virus
  source 1..52: mol_type = other DNA
caacagcgaagcggaacggcgaaacacaccttgtgtggtatattacccgttg

SEQ ID NO: 427 - DNA, 50 bp, Tobacco ringspot virus
  source 1..50: mol_type = other DNA
aaacagagaagtcaaccagagaaacacacgttgtggtatattacctggta

SEQ ID NO: 428 - DNA, 52 bp, Chicory yellow mottle virus; identical to SEQ ID NO: 425
  source 1..52: mol_type = other DNA

SEQ ID NO: 429 - DNA, 52 bp, Chicory yellow mottle virus; identical to SEQ ID NO: 425
  source 1..52: mol_type = other DNA

SEQ ID NO: 430 - DNA, 50 bp, Tobacco ringspot virus; identical to SEQ ID NO: 427
  source 1..50: mol_type = other DNA

SEQ ID NO: 431 - DNA, 68 bp, synthetic construct
  source 1..68: mol_type = other DNA
ggagagagaagtcaaccagagaaacacaccaacccattgcactccgggttggtggtatattacctggt

SEQ ID NO: 432 - DNA, 526 bp, Oryza sativa
  source 1..526: mol_type = genomic DNA
ctacggacttgattgtattgagccttggtatggaaacctgctaagtggcaacttccaaattcagagaaaccctggaattaaaaaaggggcaatcctgagccaaatccatgttttgagaaaacaagcggttctcgaactagaacccaaaggaaaaggataggtgcagagactcaatggaagctgttctaacgaatcgagttaattacgttgtgttgctagcggaactcccttctaaattagggaaagaagggctttcgaaatctaatacacacgtatagatactggcatagcaaacgattaatcacagaactcatatcataatataggttctttaattcttttttaaaatgaaaataggaatgattatgaaatagaaaattcataatttttttagaattgttgtgaatccattccaatcgaatattgagtaatcaaatccttcaattcatagttttcgaaatctttttaaaagcggattaatcggacgaggataaagagagagtcccattctacatgtcaatactga

SEQ ID NO: 433 - DNA, 526 bp, Oryza glaberrima; identical to SEQ ID NO: 432
  source 1..526: mol_type = genomic DNA

SEQ ID NO: 434 - DNA, 74 bp, Nicotiana sylvestris
  source 1..74: mol_type = genomic DNA
gaaagtcgtattcgatgaaagtcgtatgtacggcttggagggagatctttcatatatttcgagatccagcctac

SEQ ID NO: 435 - DNA, 130 bp, Solanum lycopersicum
  source 1..130: mol_type = genomic DNA
gagagccgtgtgatgggtgactatccagcacggttaagagagcacttttagtctgctctggtgaatggaagccccctatcatgcaataaggaagcagctcttctcacagcggagtcaccgttgactttat

SEQ ID NO: 436 - DNA, 77 bp, Hordeum vulgare
  source 1..77: mol_type = genomic DNA
gaaagccgtatgctttggaagaagcttgtacagtttgggaaggggttttttgagagaaaagaagaatctacttcaac

SEQ ID NO: 437 - DNA, 79 bp, Hordeum vulgare
  source 1..79: mol_type = genomic DNA
aggagctggatgagaagaaactctcatgtccagttttcgagtagagatggaactaagaaagagaaccatcgactataac

SEQ ID NO: 438 - DNA, 79 bp, Capsicum annuum
  source 1..79: mol_type = genomic DNA
aggagccgtgtgagatgaaagtctcatgcacggttttgaatgagagaaagaagtgaggaatcctcttttcgactctgac

SEQ ID NO: 439 - RNA, 43 nt, synthetic construct
  source 1..43: mol_type = other RNA
ccaatcgtggcgtgtcggcctgcttcggcaggcactggcgccg

SEQ ID NO: 440 - RNA, 49 nt, synthetic construct
  source 1..49: mol_type = other RNA
gagacggtcgggtccagatattcgtatctgtcgagtagagtgtgggctc

SEQ ID NO: 441 - RNA, 132 nt, synthetic construct
  source 1..132: mol_type = other RNA
gtgctcgcttcggcagcacatatactagtcgaccgccagatgccttgtaaccgaaagggggaagaggaaggaggtctgaggaggtcactttcccgaaaggatggcgtctagagcggacttcggtccgctttt

SEQ ID NO: 442 - RNA, 40 nt, synthetic construct
  source 1..40: mol_type = other RNA
ggcacgtacgaagggacggtgcggagaggagagtacgtgc

SEQ ID NO: 443 - RNA, 41 nt, synthetic construct
  source 1..41: mol_type = other RNA
ggcacgtacgaaggagaggagaggaagaggagagtacgtgc

SEQ ID NO: 444 - RNA, 46 nt, synthetic construct
  source 1..46: mol_type = other RNA
ggcacgtacgaaggaaggattggtatgtggtatattcgtacgtgcc

SEQ ID NO: 445 - RNA, 45 nt, synthetic construct
  source 1..45: mol_type = other RNA
ggcacgtacgaaggaaggtttggtatgtggtatattcgtacgtgc

SEQ ID NO: 446 - RNA, 42 nt, synthetic construct
  source 1..42: mol_type = other RNA
ggcacgtaccgagggagtggtgaggatgaggcgagtacgtgc

SEQ ID NO: 447 - RNA, 83 nt, synthetic construct
  source 1..83: mol_type = other RNA
gggaagatacaaggtgagcccaataatatggtttgggttaggataggaagtagagccttaaactctctaagcggtatcttccc

SEQ ID NO: 448 - RNA, 52 nt, synthetic construct
  source 1..52: mol_type = other RNA
ggctagctggaggggcgccagttcgctggtggttgggtgcggtcggctagcc

SEQ ID NO: 449 - RNA, 98 nt, synthetic construct
  source 1..98: mol_type = other RNA
gacgcaactgaatgaaatggtgaaggacgggtccaggtgtggctgcttcggcagtgcagcttgttgagtagagtgtgagctccgtaactagtcgcgtc

SEQ ID NO: 450 - RNA, 95 nt, synthetic construct
  source 1..95: mol_type = other RNA
gatgtaactgaatgaaatggtgaaggacgggtccagtaggctgcttcggcagcctacttgttgagtagagtgtgagctccgtaactagttacatc

SEQ ID NO: 451 - RNA, 100 nt, synthetic construct
  source 1..100: mol_type = other RNA
ggagacgcaactgaatgaaatggtgaaggagacggtcgggtccaggtgcacaaatgtggcctgttgagtagcgtgtgggctccgtaactagtcgcgtcac

SEQ ID NO: 452 - RNA, 57 nt, synthetic construct
  source 1..57: mol_type = other RNA
ggatgcgccttgaaaagcctgcttcggcagctggtgaatgacagctatggcgcatcc

SEQ ID NO: 453 - DNA, 44 bp, Pea early-browning virus
  source 1..44: mol_type = other DNA
attcaattaattcaatagaattaattctcgtattaatatgacaa

SEQ ID NO: 454 - DNA, 45 bp, Tobacco rattle virus
  source 1..45: mol_type = other DNA
attttatcactcttataagagtgatactcgtattaatatgaccaa

SEQ ID NO: 455 - DNA, 45 bp, Tobacco rattle virus
  source 1..45: mol_type = other DNA
attcaaagattacaatagtaatctctaccgtatttatttgacaaa

SEQ ID NO: 456 - DNA, 45 bp, Tobacco rattle virus; identical to SEQ ID NO: 455
  source 1..45: mol_type = other DNA

SEQ ID NO: 457 - DNA, 45 bp, Tobacco rattle virus
  source 1..45: mol_type = other DNA
attcggtagtgtgaaaacacattacctacgtattaatatgactaa

SEQ ID NO: 458 - DNA, 38 bp, Pea early-browning virus
  source 1..38: mol_type = other DNA
ttatggtctaagataattcttcagaccctcgtaatttt

SEQ ID NO: 459 - DNA, 38 bp, Pea early-browning virus
  source 1..38: mol_type = other DNA
cttaacaagaatcttatcaagattctgttcgtattcta

SEQ ID NO: 460 - DNA, 38 bp, Pea early-browning virus
  source 1..38: mol_type = other DNA
caaggtatatgcgaaacacgcgtaataccttcgtataa

SEQ ID NO: 461 - DNA, 211 bp, Tobacco mosaic virus
  source 1..211: mol_type = other DNA
gaaaaaagagtgatgtccgcaaagggaaaaatagtagtaatgatcggtcagtgccgaacaagaactatagaaatgttaaggattttggaggaatgagttttaaaaagaataatttaatcgatgatgattcggaggctactgtcgccgaatcggattcgttttaaatatgtcttacagtatcactactccatctcagttcgtgttcttgtca

SEQ ID NO: 462 - DNA, 135 bp, Tobacco mosaic virus
  source 1..135: mol_type = other DNA
ctttgtgatgttgctgtttcgttgaacaattgtgcgtattacacacagttggacgacgctgtatgggaggttcataagaccgcccctccaggttcgtttgtttataaaagtctggtgaagtatttgtctgataaa

SEQ ID NO: 463 - DNA, 43 bp, Cucumber mosaic virus
  source 1..43: mol_type = other DNA
ttctcatggatgcttctccgcgagattgcgttattgtctactg

SEQ ID NO: 464 - protein, 10 aa, synthetic construct
  VARIANT 2: note = X is R, G, or F
  VARIANT 3: note = X is Y or G
  VARIANT 4: note = X is A or F
  VARIANT 5: note = X is Y or V
  VARIANT 8: note = X is any amino acid
KXXXXILXFY

SEQ ID NO: 465 - protein, 9 aa, synthetic construct
  VARIANT 3: note = X is L or F
  VARIANT 4: note = X is Y or I
  VARIANT 7: note = X is any amino acid
IVXXVLXNL

SEQ ID NO: 466 - DNA, 82 bp, Nicotiana tabacum
  source 1..82: mol_type = genomic DNA
agacgcatccatggctgaatggttaaagcgcccaactcataattggcgaattcgtaggttcaattcctactggatgcaaaga

SEQ ID NO: 467 - DNA, 103 bp, Olive latent virus 2
  source 1..103: mol_type = other DNA
gatatttcgcactcctagtgaatcttcctagtatatccgctgaaaaacgagagaggcaacaaactacagaggttacagtctcaccttttaaacaacagagaaa

SEQ ID NO: 468 - DNA, 47 bp, Grapevine leafroll-associated virus 7
  source 1..47: mol_type = other DNA
gatttactactaagcatactgcaaacgtagtaattcttttaatcgtc

SEQ ID NO: 469 - DNA, 298 bp, Olive latent virus 2
  source 1..298: mol_type = other DNA
ttgctcggctctttcatgtgtacaagtagagtgattcgggaaggtggctcgcctagagcggtgtgctggtttctacctaagaagccaggagggtgaagtgactttgtcatgactagttgagtggtactttaaccacgagtcgtcgttgagacgccagtttccttacaaggaagctgagagggtttttccggtactttacccggaattcgaattgaactgtcttcgacagagttcaaactcctcgctagataccctaacgagtatcttggggactctccgtggagagtcagtaaagacc

SEQ ID NO: 470 - DNA, 192 bp, Grapevine leafroll-associated virus 7
  source 1..192: mol_type = other DNA
gtaaataaaggcatttttgattaaagttattgccttttagtctaccactgtgataagcacaagtgtggttgtaaatctagaatttaaatggaataatattataaataatacatatagtaatttacaatatttaaacgtcctaaagttgtcttcgacacaccttggacgttcatttaaaaaataaactaggtc

SEQ ID NO: 471 - protein, 908 aa, Olive latent virus 2
MDSAALEKMTGAKFPAVQGVIEEFSRDRVQNVLGDMRSRQVIKYAVGLSEASVQELRFNWPCFTWEEESVPLPPHPFAAYSRRAFTRWAIAQCGPVPIKDFGGNWFLHWQWQTGVHSCCPLLNPRDGAHQTRRELNMESYLRTHGPKYDKFNELSRPDLCHHRAEDCSVRAKAALSVDSAYDMGLKNTCKAMHRAGIELLHGNILFDPDMLIEAKMEGFVAGMNYHWKKTRRSTGLMSSFLEMGSSLFGVSNSSKEGEGHHDLKIKMGSSSTHMVPADWEISYHFRDDCVLGYTHNLADVLSIATGSYVKVGNTFYELERTGLKSGMLMYTITACKGLYDRASARSTPLSAKASTVIINGMSYQVGEKLDPISFPYLAASFYMQAQKAVFEVQQVVDLHTPNRNLWSWFKKKFELKAHAFLFALGLRDSHDEWLLDQIEFELNETVCTLPGEFLEPVSEVERLDAALEDWRRDRERLNGKSVENLKTLTVLVELAKKLGISAYEVLNSHQNESERPKDQWHVEAALFEAVELERAHWKMLTAEAQAMSLQDPLSREAKSKGWSYESSDSLPCAYAYVFSEGRFVKPADLKKKTRVLVSPSMQIMNQIRMAESLEKAIAMNVKSCKKTWIDGVAGCGKTYEIVHTADIFKKDDLILTANKKSQEDIFSQLKPGTDCAKRIRTVDSYLLKPDVQAKRLFIDEAGLVHPGKLLAAMRFAECDDCLLFGDSEQIPFVNIVESLQPAKFLKLEVDAREVRETTYRCPADVTATLATLYKKKKIVTKSKVLKSVTSKSLASASAVSGLDPHSWHLTMYQADKAELVRVARTNQMDDVWIKEHIKTVHEAQGISVPHVKLYRFKTFDQPLFDAAHAEAYRLVAISRHTQSFTYIGVNQHLCKADRMLKFVICQIP

SEQ ID NO: 472 - protein, 505 aa, Grapevine leafroll-associated virus 7
DIYELCCDRVNFPTISSRPSLSNVYSVNEYMNLVFPTQSAYDFIHRTLSFEQTDFDIPVLDNAKVSMSSSKDYVGKTYKLPLLCGKGERARPNTWRQVLISLSHRNFAAPQINEEHDQEFTSSVLFESLMNCMKLEKISECFDVVEPCLNKIDMWLTTRDSRRFKGILNNLSYDVWVEQVTNLKLMVKGDMKPKLDESHYDKYAPPSNIVYYQQMINMFFSPVFLEIMGRIKYCLKDNIVLYGGMNLSELGSVIKSKLTDPLPSYNYTELDFSKFDKSQGSIIKMYEEMVYKFFKFSPNTYDNFKLSEYFCQASSNCGVKVDLFSSRRTGSPNTWLSNTLCTLAILSATYQLEDYDLILVSGDDSLLVSKNPVLNKAYEINKNFGMECKFMEHPCPYFCSKFLVEVDDNCVIMPDLVKVFERWSNPIPTDMMENDGVLKERFTSYKDLLQGYFNDNISFHLDILLSKRYFHPEGASYAAFCFIHVVLSNFRNFKEIFDTSSEVII

SEQ ID NO: 473 - DNA, 2727 bp, Olive latent virus 2
  source 1..2727: mol_type = other DNA
atggatagtgccgcattggaaaaaatgacgggagctaagttccctgccgtacaaggcgtgatagaggagttctcacgcgacagagtacagaatgtactcggtgatatgcgctccaggcaggtgatcaagtacgccgtaggactatccgaggctagtgtacaggagcttcgattcaattggccctgtttcacttgggaggaagaatccgttccgcttcccccccatccctttgccgcctactcgaggcgagcttttacgcgttgggcaattgctcagtgtggaccggtcccaattaaagatttcgggggcaactggtttttacattggcaatggcagacgggagttcactcctgttgtccacttttgaaccctagggatggagcccaccaaacacgtcgcgagcttaacatggagtcctatttgcgcacacatggacccaagtatgacaagtttaacgaactgtcaagacccgatttgtgccaccatcgcgcagaagattgcagtgtgcgtgctaaagccgccctatccgtagattccgcctacgatatgggtctgaagaacacttgcaaagcgatgcatcgggccgggattgaacttttacacggaaatattctgttcgatcccgacatgttgatcgaggctaagatggaaggctttgtggccggaatgaattatcattggaagaaaacgcgccggtccacaggcctgatgtcgtcatttctcgagatgggatcctcccttttcggagtgtcgaattcctcgaaggagggggaaggacatcacgacctgaaaatcaagatgggctctagttctacgcacatggtccccgctgactgggaaatttcgtatcatttccgggacgattgcgttttgggctacacccacaacttggctgatgtcctatcaattgctactggttcttacgtgaaggtagggaacaccttttatgagttggagagaacaggcttaaagtccggtatgctcatgtatacgattactgcctgtaagggtttgtatgaccgggcttctgctagaagtactccgctgtcggctaaggccagtactgtgataatcaatggtatgtcctaccaggtgggtgaaaaattggacccgatctcttttccctatttagctgccagtttctacatgcaggcgcagaaagctgtctttgaggtgcaacaagtggtagatctgcacacgcctaataggaacttgtggagctggttcaaaaagaagttcgagctgaaggcccatgcgtttctttttgctttgggtcttcgcgattcacatgatgagtggttactagatcagattgagttcgagctcaatgagacggtttgcactctaccaggcgaatttctggaaccagtttcggaggtcgaaagactggacgcggctcttgaggattggaggagagacagggaaagattgaatggcaagtcggttgaaaacttgaagacactgactgtcttggtggaactagcaaaaaagcttggaatctcggcttacgaggtgttgaattcgcatcagaacgaatctgagagacccaaggatcagtggcatgttgaagctgctctttttgaagctgtggaactggagcgggcacattggaaaatgttgacagctgaagctcaggctatgtctctgcaagaccccctgtctcgagaagcaaagagtaagggatggtcctacgaatcttctgacagtttaccgtgtgcctatgcatacgtgttttctgaaggtaggttcgtcaagccggctgatttgaaaaagaagacacgtgtcttggtttccccgtctatgcagataatgaatcaaatacgtatggccgaatcgttggagaaggccattgcgatgaatgtgaaatcttgcaagaagacgtggatcgacggtgtagctggttgtggaaagacatatgaaatcgtgcatacggctgatatctttaagaaggatgacttgatactaacagccaacaagaaaagtcaggaggacatcttctcgcagctgaaaccagggaccgactgtgcgaagcgcattcgtacggttgactcgtacctgttgaaacctgacgtacaggcgaagagattgttcatagatgaggctggtttggtacatccgggaaaactcttagctgccatgaggtttgctgagtgtgacgattgccttctctttggtgattcggagcagatcccgtttgtcaacatagttgaaagtctgcaacccgcgaagttcttgaagctcgaggtggatgcgagagaagttcgagaaacaacttatcgttgtccggctgatgttaccgccactctcgccaccttgtacaagaagaagaaaattgtgacgaagagcaaggtcctgaaatctgtgacgtcaaaatctttggcctcggcgtcagcggtgagtgggttggacccacattcctggcacttgactatgtatcaggccgataaggccgaacttgtccgtgtggccagaaccaaccaaatggatgatgtttggatcaaagagcatataaagacggtgcatgaggcgcaaggaatctcggttccccacgttaaattgtaccgatttaagacttttgatcaaccgctttttgatgcggcccatgcagaagcgtatcgtttggttgcgatttctaggcatacacaatccttcacttacattggtgttaatcaacatctttgtaaagcggacagaatgctgaaatttgtcatatgccagatcccgtga

SEQ ID NO: 474 - DNA, 1518 bp, Grapevine leafroll-associated virus 7
  source 1..1518: mol_type = other DNA
gacatttatgaactctgttgtgatcgagtgaattttcccacaatttcatctcgaccaagtttgagcaacgtctattcagtgaatgagtatatgaacttagtattcccaactcaaagtgcatatgattttattcacaggactttgtcattcgaacagacggacttcgacatcccagtattggacaatgctaaagtctcgatgtcaagttcgaaggattatgttgggaagacttataaattaccattattatgtggtaaaggagaaagggcgagaccaaatacctggagacaagtgctgatctctttgtcacatcgaaattttgctgcccctcaaatcaatgaagaacatgaccaggaattcacatcaagtgttctttttgaaagtcttatgaattgcatgaaacttgagaagatttcagaatgtttcgatgttgtggagccgtgtttaaataagattgatatgtggttaacgactagagatagtcgaagatttaaaggaattttaaataacctttcatatgatgtttgggtcgaacaagtaacaaatttaaaactaatggttaaaggagacatgaaaccgaaattggatgagtcccattatgacaaatatgcacctccgtccaacattgtttattatcagcagatgataaatatgtttttcagtcctgtgtttttggaaataatgggtaggataaaatattgtcttaaggacaacattgtgttatatggtggaatgaatctgtctgaactaggttctgttataaaaagcaaattaactgatccattaccatcctataactacactgagcttgatttttccaaatttgataaatctcaaggatcaataattaaaatgtatgaagaaatggtttataaattctttaaattttctccaaacacatatgacaatttcaaactgtctgaatatttttgccaagcctcctcaaattgtggggtgaaagttgacttattttctagtagaagaactggaagcccaaacacctggttgtccaacaccttgtgtacattggctattctatctgccacataccaattggaggactatgatttaatcttagtcagtggggatgattctttgttagtgtctaaaaatcctgttctgaataaagcgtatgaaatcaacaaaaactttggtatggagtgtaagttcatggaacatccctgtccttacttctgctcaaagtttttagttgaggtggatgataattgcgttattatgccggatcttgttaaagtctttgaaaggtggagtaatcccatccctaccgacatgatggaaaacgatggggtcttgaaagaaagatttacttcctataaagatcttcttcaaggttacttcaatgacaacattagttttcatctcgatatactcctttcaaaacgttatttccaccctgaaggtgcttcttacgcagctttctgttttatacacgtggttttatctaactttaggaattttaaagaaatttttgatacgtcaagtgaagttattatataa

SEQ ID NO: 475 - protein, 182 aa, Olive latent virus 2
MSSAAQPMSRRARRRAARRALGSQPGTSGGMVIPVSFVVSGATSADFVTYHSLYSRLAAYNGDLWIRRVAVRVTGSVAKRMGKYAFFEGLAVDKSQILSAAHARPYVYGLPSTLSLPGGRRQVKDFQSINLFFLLDGTAHAGEFAAGTFYFEFEGSPNVDFPRDSEGSNQAVEKFYLEHINA

SEQ ID NO: 476 - protein, 301 aa, Grapevine leafroll-associated virus 7
MENIVKNFEEIKKIVTKNVGNRTQSEITTLDKFKTNLVNYTEKSDEIPSNVKTELLKYKDMEGLDIETSNRLKEFVLKLEVRQPQGNESNVASSSIFDDLEVPTNIVIHTQAANEMTPSQCEEFAKVLNEFIKKFMFKLPTESKLTKKQLTTGMYAFFTAANEQSTSKGNGSNKNLSNNFTLDGVEYEWNFSHAFPFFDEAFIKEKIQNPIRRYMRAKSQEIDKLLITMGYVPSGRLAAQWGVVDGLRDMIGDAVPLYKKAMTADQFTSQLAATEQATNKKGQASNVVHVSQVLGRTLNRR

SEQ ID NO: 477 - DNA, 549 bp, Olive latent virus 2
  source 1..549: mol_type = other DNA
atgtcttcggcagctcaaccgatgtcccgccgcgcccgcagacgagctgcccggcgcgccctgggttctcaaccaggaacgtccggaggtatggtgatccccgtatcgttcgtagtgagcggagcgacgtccgccgactttgtgacttatcatagtctttacagtcggttggccgcatataatggcgatttgtggatccgacgtgtagccgtccgtgtgactggttccgtcgctaagcgtatgggtaaatacgccttttttgagggtctggcggtggacaaatctcaaatcctgtccgccgcgcatgcgcgtccttacgtgtacggcctcccatctacgcttagtctccccggagggagaaggcaggtgaaagactttcaatctattaacctgtttttccttctagatggtactgcccacgccggtgagtttgccgccggcacgttctatttcgagttcgagggatcccctaatgtggattttcctcgcgattccgagggtagtaatcaggcggtagagaagttttacctagagcatatcaatgcttag

SEQ ID NO: 478 - DNA, 906 bp, Grapevine leafroll-associated virus 7
  source 1..906: mol_type = other DNA
atggaaaatatagttaaaaattttgaggaaataaagaaaattgttacaaaaaatgttggaaataggacgcaaagtgaaattactacgctagacaaatttaagacaaacctagtgaattacaccgagaagtctgatgaaataccatccaatgtcaaaacggaattgcttaaatataaagacatggaagggttagacatagagacttccaataggttgaaagagttcgttttaaagttagaagtgagacagccccaaggaaatgaaagcaatgttgcgagctcctcaatctttgacgatctggaagtaccaactaacattgtgattcacacacaagcagccaatgaaatgacaccatcgcagtgtgaagaattcgctaaagtattaaatgaatttatcaaaaagtttatgtttaaactaccaaccgagtcgaagttgacaaagaaacagttaaccacgggtatgtatgctttctttaccgctgcaaatgagcagtcgacttctaaggggaatggtagtaacaagaatctatcgaataatttcacattagacggtgtggagtatgaatggaatttctcacatgctttcccattctttgatgaagcatttatcaaagaaaaaattcaaaaccctattaggagatacatgcgtgccaagtcacaagagatagacaagcttctaatcaccatgggttatgttccttctggcaggttggcagctcaatggggtgttgtagacggattaagagatatgataggagatgcagtaccactatataagaaggccatgactgcagatcagttcacttctcaacttgcggcaacagagcaagccacgaataagaagggacaggctagtaatgtggtgcacgtatcacaagtacttggacgtacattaaacaggagatag

SEQ ID NO: 479 - DNA, 2687 bp, synthetic construct
  source 1..2687: mol_type = other DNA
gatatttcgcactcctagtgaatcttcctagtatatccgctgaaaaacgagagaggcaacaaactacagaggttacagtctcaccttttaaacaacagagaaagtatttttacaacaattaccaacaacaacaaacaacaaacaacattacaattactatttacaattacacacaaacacgtttttattccggctgtgtagtctttcaacgttgtcttccgatgcccgtgtttccaaacttcagccaagaaatcgtctaagcctaaccttttccaaatctcatactcgactgcacaatgaaattcgttctgtgatttgtcatacttggaaatgtctagctctaatatgtccataggaacattagagtccagatctgagaaaaattcttcgatctgtgtaggcgttttccttgtataaaacatgaatcttgaactgtcaattgtctctagcagctgtcttgttaattctgaaaatacaggaccaaaaagcgcattgattttcttgctatgatacacaatagtttgcaaagccgggtattcagtttgaatactaagatccaaacgctgtttcggctgctgcttgatcatgtgcctgtattgatcaacggctggtaaatcaataaagtcaaaatcagccaactggccaattgttgacttctcttgcttttcgatccatctttccaaactcgcccttgaaagcagaggtatattttttggttttttcttttctttaattaagtatgcatcaaaaaacttatctactactagagaagcggtgtcttcgatgtcaacaacccctactaattcgggagagttgaaatttcttttgatcatcgcgaccaaattttccaacaatccaggttttcgaggtttttcagcagcagtcctgatcacaggtttcaatgtcgtctcagattctctcggaagaggcaccgatttcgacatatccaacacacaatccttgacattcaaactattctctcgtatttgcatagttacagcatcatactcattgagtatagtactgtttcccggcaaacacttgtcgtaataatattgcatgtcagaaacatctcctgtttttggtgctgcgacgaaaaggttaacacctttgtacaccgattctatctgtaattgctattgagtcgacggtagtcaagatgcataataaataacggattgtgtccgtaatcacacgtggtgcgtacgataacgcatagtgtttttccctccacttaaatcgaagggttgtgtcttggatcgcgcgggtcaaatgtatatggttcatatacatccgcaggcacgtaataaagcgaggggttcgaatccccccgttacccccggtaggggcccaagcacaacatttcaaccagaaacactagccgaagcaaatccattccacaagcacctggtgggatcatctcatcatcagaaaccaagagagagattccgtgtccgcttgttgtagtagattgtgaggactgaggaccgagaagcagccatggctctagttgttaaaggaaaagtgaatatcaatgagtttatcgacctgacaaaaatggagaagatcttaccgtcgatgtttacccctgtaaagagtgttatgtgttccaaagttgataaaataatggttcatgagaatgagtcattgtcagaggtgaaccttcttaaaggagttaagcttattgatagtggatacgtctgtttagccggtttggtcgtcacgggcgagtggaacttgcctgacaattgcagaggaggtgtgagcgtgtgtctggtggacaaaaggatggaaagagccgacgaggccactctcggatcttactacacagcagctgcaaagaaaagatttcagttcaaggtcgttcccaattatgctataaccacccaggacgcgatgaaaaacgtctggcaagttttagttaatattagaaatgtgaagatgtcagcgggtttctgtccgctttctctggagtttgtgtcggtgtgtattgtttatagaaataatataaaattaggtttgagagagaagattacaaacgtgagagacggagggcccatggaacttacagaagaagtcgttgatgagttcatggaagatgtccctatgtcgatcaggcttgcaaagtttcgatctcgaaccggaaaaaagagtgatgtccgcaaagggaaaaatagtagtaatgatcggtcagtgccgaacaagaactatagaaatgttaaggattttggaggaatgagttttaaaaagaataatttaatcgatgatgattcggaggctactgtcgccgaatcggattcgttttaaagacgcatccatggctgaatggttaaagcgcccaactcataattggcgaattcgtaggttcaattcctactggatgcaaagattgctcggctctttcatgtgtacaagtagagtgattcgggaaggtggctcgcctagagcggtgtgctggtttctacctaagaagccaggagggtgaagtgactttgtcatgactagttgagtggtactttaaccacgagtcgtcgttgagacgccagtttccttacaaggaagctgagagggtttttccggtactttacccggaattcgaattgaactgtcttcgacagagttcaaactcctcgctagataccctaacgagtatcttggggactctccgtggagagtcagtaaagacc

SEQ ID NO: 480 - DNA, 5340 bp, synthetic construct
  source 1..5340: mol_type = other DNA
gatatttcgcactcctagtgaatcttcctagtatatccgctgaaaaacgagagaggcaacaaactacagaggttacagtctcaccttttaaacaacagagaaagtatttttacaacaattaccaacaacaacaaacaacaaacaacattacaattactatttacaattacaaagctgactatgtgatcttattaaaattaggttaaatttcgaggttaaaaatagttttaatattgctatagtcttagaggtcttgtatatttatacttaccacacaagatggaccggagcagccctccaatatctagtgtaccctcgtgctcgctcaaacattaagtggtgttgtgcgaaaagaatctcacttcaaatggcatcttcttcttcttcttctagatggagctatgatgttttcttaagttttagaggcgaagatactcgaaaaacgtttacaagtcacttatacgaagtcttgaatgataagggaataaaaacctttcaagatgataaaaggctagagtacggcgcaaccatcccaggtgaactctgtaaagctatagaagagtctcaatttgccattgttgttttctcagagaattatgcaacatcaaggtggtgtttgaatgaactagtgaagatcatggaatgcaaaactcgatttaagcaaactgttataccgatattctatgatgtggatccatcacatgttcggaaccaaaaggagagctttgcaaaagcctttgaagaacatgaaacaaagtataaggatgatgttgagggaatacaaagatggaggattgctttaaatgaagcggccaatctcaaaggctcctgtgataatcgtgacaagactgatgcagactgtattcgacagattgttgaccaaatctcatccaaattatgcaagatttctttatcttatttgcaaaacattgttggaatagatactcatttagagaaaatagaatccttactagagataggaatcaatggtgttcggattatggggatctggggaatggggggagtcggtaaaacaacaatagcaagagctatatttgatactcttttaggaagaatggatagttcctatcaatttgatggtgcttgtttccttaaggatattaaagaaaacaaacgtggaatgcattctttgcaaaatgcccttctctctgaacttttaagggaaaaagctaattacaataatgaggaggatggaaagcaccaaatggctagtagacttcgttcgaagaaggtcctaattgtgcttgatgatatagataataaagatcattatttggagtatttagcaggtgatcttgattggtttggtaatggtagtagaattattataacaactagagacaagcatttgatagagaagaatgatataatatatgaggtgactgcactacccgatcatgaatccattcaattgttcaaacaacatgctttcggaaaagaagttccaaatgagaattttgagaagctttcattagaggtagtaaattatgctaaaggccttcctttagccctcaaagtgtggggttctttgctgcataacctacgattaactgaatggaaaagtgctatagagcacatgaaaaataactcttattctggaattattgataagctcaaaataagttatgatggattagagcccaaacaacaagagatgtttttagatatagcatgcttcttgcgaggggaagaaaaagattacatcctacaaatccttgagagttgtcatattggagctgaatacgggttacgtattttaattgacaaatctcttgtgttcatctctgaatataatcaggttcaaatgcatgacttaatacaggatatgggtaaatatatagtgaattttcaaaaagatcccggagaacgtagcagattatggctcgccaaggaagtcgaagaagtgatgagcaacaacacagggaccatggcaatggaagcaatttgggtttcttcttattctagtactctacgctttagcaatcaggccgtgaaaaatatgaaaaggcttagggtatttaacatggggaggtcgtcgacacattatgccatcgattatctgcccaacaacttgcgttgttttgtttgcactaactatccttgggagtcatttccatctacatttgaactcaaaatgcttgttcacctccaactccgacacaattctctgcgtcatttatggacagaaacaaagcatttgccgtctctacggaggatagatctcagctggtctaaaagattgacgcgaacaccagatttcacggggatgccaaatttggagtatgtgaatttgtatcaatgtagtaatcttgaagaagttcaccattccctgggatgttgcagcaaagtcattggtttatatttgaatgattgtaaaagccttaagaggtttccatgtgttaacgtggaatctcttgaatatctgggtctaagaagttgcgatagtttagagaaattgccagaaatctacgggagaatgaagccggagatacagattcacatgcaaggctctgggataagggaactaccatcatctatttttcagtacaaaactcatgttaccaagctattgttgtggaatatgaaaaaccttgtagctcttccaagcagcatatgtaggttgaaaagtttggttagtctgagtgtgtcgggttgctcaaaacttgaaagcttgccagaagagataggggatttagacaacttacgggtgtttgatgccagtgatactctaattttacgacctccgtcttccatcatacgcttgaacaaacttataatcttgatgtttcgaggcttcaaagatggagtgcactttgagttccctcctgtggctgaaggattacactcattggaatatctgaatctcagttactgcaatctaatagatggaggacttccggaagagattggatccttatcctctttgaaaaagttggatctcagtagaaataattttgagcatttgccttcaagtatagcccaacttggtgctcttcaatccttagacttaaaagattgccagaggcttacacagctaccagaacttcccccagaattaaatgaattgcatgtagattgtcatatggctctgaaatttatccattatttagtaacaaagagaaagaaactacatagagtgaaacttgatgatgcacacaatgatactatgtacaatttgtttgcatataccatgtttcagaatatctcttccatgaggcatgacatctctgcttcagattccttgtcactaacagtatttaccggtcaaccgtatcctgaaaagatcccgagttggttccaccatcagggttgggatagtagtgtatcagtcaatttgcctgaaaattggtatatacctgataaattcttgggatttgctgtatgttactctcgtagcttaattgacacaacagctcacttgattcccgtatgtgatgacaagatgtcgcgcatgacccagaaacttgccttatcagaatgtgatacagaatcatccaactattcagaatgggatatacattttttctttgtaccttttgctggcttatgggatacatctaaggcaaatggaaaaacaccaaatgattatgggattattaggctatctttttctggagaagagaagatgtatggacttcgtttgttgtataaagaaggaccagaggttaatgccttgttacaaatgagggaaaatagcaatgaaccaacagaacattccactgggataaggaggactcaatataacaacagaacttccttttatgagctcatcaatgggtgaggtagtcaagatgcataataaataacggattgtgtccgtaatcacacgtggtgcgtacgataacgcatagtgtttttccctccacttaaatcgaagggttgtgtcttggatcgcgcgggtcaaatgtatatggttcatatacatccgcaggcacgtaataaagcgaggggttcgaatccccccgttacccccggtaggggcccaagcacaacatttcaaccagaaacactagccgaagcaaatccattccacaagcacctggtgggatcatctcatcatcagaaaccaagagagagattccgtgtccgcttgttgtagtagattgtgaggactgaggaccgagaagcagccatggctctagttgttaaaggaaaagtgaatatcaatgagtttatcgacctgacaaaaatggagaagatcttaccgtcgatgtttacccctgtaaagagtgttatgtgttccaaagttgataaaataatggttcatgagaatgagtcattgtcagaggtgaaccttcttaaaggagttaagcttattgatagtggatacgtctgtttagccggtttggtcgtcacgggcgagtggaacttgcctgacaattgcagaggaggtgtgagcgtgtgtctggtggacaaaaggatggaaagagccgacgaggccactctcggatcttactacacagcagctgcaaagaaaagatttcagttcaaggtcgttcccaattatgctataaccacccaggacgcgatgaaaaacgtctggcaagttttagttaatattagaaatgtgaagatgtcagcgggtttctgtccgctttctctggagtttgtgtcggtgtgtattgtttatagaaataatataaaattaggtttgagagagaagattacaaacgtgagagacggagggcccatggaacttacagaagaagtcgttgatgagttcatggaagatgtccctatgtcgatcaggcttgcaaagtttcgatctcgaaccggaaaaaagagtgatgtccgcaaagggaaaaatagtagtaatgatcggtcagtgccgaacaagaactatagaaatgttaaggattttggaggaatgagttttaaaaagaataatttaatcgatgatgattcggaggctactgtcgccgaatcggattcgttttaaagacgcatccatggctgaatggttaaagcgcccaactcataattggcgaattcgtaggttcaattcctactggatgcaaagattgctcggctctttcatgtgtacaagtagagtgattcgggaaggtggctcgcctagagcggtgtgctggtttctacctaagaagccaggagggtgaagtgactttgtcatgactagttgagtggtactttaaccacgagtcgtcgttgagacgccagtttccttacaaggaagctgagagggtttttccggtactttacccggaattcgaattgaactgtcttcgacagagttcaaactcctcgctagataccctaacgagtatcttggggactctccgtggagagtcagtaaagacc

SEQ ID NO: 481 - DNA, 2415 bp, synthetic construct
  source 1..2415: mol_type = other DNA
gatatttcgcactcctagtgaatcttcctagtatatccgctgaaaaacgagagaggcaacaaactacagaggttacagtctcaccttttaaacaacagagaaacacaaacacgtttttattccggctgtgtagtctttcaacgttgtcttccgatgcccgtgtttccaaacttcagccaagaaatcgtctaagcctaaccttttccaaatctcatactcgactgcacaatgaaattcgttctgtgatttgtcatacttggaaatgtctagctctaatatgtccataggaacattagagtccagatctgagaaaaattcttcgatctgtgtaggcgttttccttgtataaaacatgaatcttgaactgtcaattgtctctagcagctgtcttgttaattctgaaaatacaggaccaaaaagcgcattgattttcttgctatgatacacaatagtttgcaaagccgggtattcagtttgaatactaagatccaaacgctgtttcggctgctgcttgatcatgtgcctgtattgatcaacggctggtaaatcaataaagtcaaaatcagccaactggccaattgttgacttctcttgcttttcgatccatctttccaaactcgcccttgaaagcagaggtatattttttggttttttcttttctttaattaagtatgcatcaaaaaacttatctactactagagaagcggtgtcttcgatgtcaacaacccctactaattcgggagagttgaaatttcttttgatcatcgcgaccaaattttccaacaatccaggttttcgaggtttttcagcagcagtcctgatcacaggtttcaatgtcgtctcagattctctcggaagaggcaccgatttcgacatatccaacacacaatccttgacattcaaactattctctcgtatttgcatagttacagcatcatactcattgagtatagtactgtttcccggcaaacacttgtcgtaataatattgcatgtcagaaacatctcctgtttttggtgctgcgacgaaaaggttaacacctttgtacaccgattctatctgtaattgctattgagtcgacagcacaacatttcaaccagaaacactagccgaagcaaatccattccacaagcacctggtgggatcatctcatcatcagaaaccaagagagagattccgtgtccgcttgttgtagtagattgtgaggactgaggaccgagaagcagccatggctctagttgttaaaggaaaagtgaatatcaatgagtttatcgacctgacaaaaatggagaagatcttaccgtcgatgtttacccctgtaaagagtgttatgtgttccaaagttgataaaataatggttcatgagaatgagtcattgtcagaggtgaaccttcttaaaggagttaagcttattgatagtggatacgtctgtttagccggtttggtcgtcacgggcgagtggaacttgcctgacaattgcagaggaggtgtgagcgtgtgtctggtggacaaaaggatggaaagagccgacgaggccactctcggatcttactacacagcagctgcaaagaaaagatttcagttcaaggtcgttcccaattatgctataaccacccaggacgcgatgaaaaacgtctggcaagttttagttaatattagaaatgtgaagatgtcagcgggtttctgtccgctttctctggagtttgtgtcggtgtgtattgtttatagaaataatataaaattaggtttgagagagaagattacaaacgtgagagacggagggcccatggaacttacagaagaagtcgttgatgagttcatggaagatgtccctatgtcgatcaggcttgcaaagtttcgatctcgaaccggaaaaaagagtgatgtccgcaaagggaaaaatagtagtaatgatcggtcagtgccgaacaagaactatagaaatgttaaggattttggaggaatgagttttaaaaagaataatttaatcgatgatgattcggaggctactgtcgccgaatcggattcgttttaaagacgcatccatggctgaatggttaaagcgcccaactcataattggcgaattcgtaggttcaattcctactggatgcaaagattgctcggctctttcatgtgtacaagtagagtgattcgggaaggtggctcgcctagagcggtgtgctggtttctacctaagaagccaggagggtgaagtgactttgtcatgactagttgagtggtactttaaccacgagtcgtcgttgagacgccagtttccttacaaggaagctgagagggtttttccggtactttacccggaattcgaattgaactgtcttcgacagagttcaaactcctcgctagataccctaacgagtatcttggggactctccgtggagagtcagtaaagacc

SEQ ID NO: 482 - DNA, 5068 bp, synthetic construct
  source 1..5068: mol_type = other DNA
gatatttcgcactcctagtgaatcttcctagtatatccgctgaaaaacgagagaggcaacaaactacagaggttacagtctcaccttttaaacaacagagaaaaagctgactatgtgatcttattaaaattaggttaaatttcgaggttaaaaatagttttaatattgctatagtcttagaggtcttgtatatttatacttaccacacaagatggaccggagcagccctccaatatctagtgtaccctcgtgctcgctcaaacattaagtggtgttgtgcgaaaagaatctcacttcaaatggcatcttcttcttcttcttctagatggagctatgatgttttcttaagttttagaggcgaagatactcgaaaaacgtttacaagtcacttatacgaagtcttgaatgataagggaataaaaacctttcaagatgataaaaggctagagtacggcgcaaccatcccaggtgaactctgtaaagctatagaagagtctcaatttgccattgttgttttctcagagaattatgcaacatcaaggtggtgtttgaatgaactagtgaagatcatggaatgcaaaactcgatttaagcaaactgttataccgatattctatgatgtggatccatcacatgttcggaaccaaaaggagagctttgcaaaagcctttgaagaacatgaaacaaagtataaggatgatgttgagggaatacaaagatggaggattgctttaaatgaagcggccaatctcaaaggctcctgtgataatcgtgacaagactgatgcagactgtattcgacagattgttgaccaaatctcatccaaattatgcaagatttctttatcttatttgcaaaacattgttggaatagatactcatttagagaaaatagaatccttactagagataggaatcaatggtgttcggattatggggatctggggaatggggggagtcggtaaaacaacaatagcaagagctatatttgatactcttttaggaagaatggatagttcctatcaatttgatggtgcttgtttccttaaggatattaaagaaaacaaacgtggaatgcattctttgcaaaatgcccttctctctgaacttttaagggaaaaagctaattacaataatgaggaggatggaaagcaccaaatggctagtagacttcgttcgaagaaggtcctaattgtgcttgatgatatagataataaagatcattatttggagtatttagcaggtgatcttgattggtttggtaatggtagtagaattattataacaactagagacaagcatttgatagagaagaatgatataatatatgaggtgactgcactacccgatcatgaatccattcaattgttcaaacaacatgctttcggaaaagaagttccaaatgagaattttgagaagctttcattagaggtagtaaattatgctaaaggccttcctttagccctcaaagtgtggggttctttgctgcataacctacgattaactgaatggaaaagtgctatagagcacatgaaaaataactcttattctggaattattgataagctcaaaataagttatgatggattagagcccaaacaacaagagatgtttttagatatagcatgcttcttgcgaggggaagaaaaagattacatcctacaaatccttgagagttgtcatattggagctgaatacgggttacgtattttaattgacaaatctcttgtgttcatctctgaatataatcaggttcaaatgcatgacttaatacaggatatgggtaaatatatagtgaattttcaaaaagatcccggagaacgtagcagattatggctcgccaaggaagtcgaagaagtgatgagcaacaacacagggaccatggcaatggaagcaatttgggtttcttcttattctagtactctacgctttagcaatcaggccgtgaaaaatatgaaaaggcttagggtatttaacatggggaggtcgtcgacacattatgccatcgattatctgcccaacaacttgcgttgttttgtttgcactaactatccttgggagtcatttccatctacatttgaactcaaaatgcttgttcacctccaactccgacacaattctctgcgtcatttatggacagaaacaaagcatttgccgtctctacggaggatagatctcagctggtctaaaagattgacgcgaacaccagatttcacggggatgccaaatttggagtatgtgaatttgtatcaatgtagtaatcttgaagaagttcaccattccctgggatgttgcagcaaagtcattggtttatatttgaatgattgtaaaagccttaagaggtttccatgtgttaacgtggaatctcttgaatatctgggtctaagaagttgcgatagtttagagaaattgccagaaatctacgggagaatgaagccggagatacagattcacatgcaaggctctgggataagggaactaccatcatctatttttcagtacaaaactcatgttaccaagctattgttgtggaatatgaaaaaccttgtagctcttccaagcagcatatgtaggttgaaaagtttggttagtctgagtgtgtcgggttgctcaaaacttgaaagcttgccagaagagataggggatttagacaacttacgggtgtttgatgccagtgatactctaattttacgacctccgtcttccatcatacgcttgaacaaacttataatcttgatgtttcgaggcttcaaagatggagtgcactttgagttccctcctgtggctgaaggattacactcattggaatatctgaatctcagttactgcaatctaatagatggaggacttccggaagagattggatccttatcctctttgaaaaagttggatctcagtagaaataattttgagcatttgccttcaagtatagcccaacttggtgctcttcaatccttagacttaaaagattgccagaggcttacacagctaccagaacttcccccagaattaaatgaattgcatgtagattgtcatatggctctgaaatttatccattatttagtaacaaagagaaagaaactacatagagtgaaacttgatgatgcacacaatgatactatgtacaatttgtttgcatataccatgtttcagaatatctcttccatgaggcatgacatctctgcttcagattccttgtcactaacagtatttaccggtcaaccgtatcctgaaaagatcccgagttggttccaccatcagggttgggatagtagtgtatcagtcaatttgcctgaaaattggtatatacctgataaattcttgggatttgctgtatgttactctcgtagcttaattgacacaacagctcacttgattcccgtatgtgatgacaagatgtcgcgcatgacccagaaacttgccttatcagaatgtgatacagaatcatccaactattcagaatgggatatacattttttctttgtaccttttgctggcttatgggatacatctaaggcaaatggaaaaacaccaaatgattatgggattattaggctatctttttctggagaagagaagatgtatggacttcgtttgttgtataaagaaggaccagaggttaatgccttgttacaaatgagggaaaatagcaatgaaccaacagaacattccactgggataaggaggactcaatataacaacagaacttccttttatgagctcatcaatgggtgaagcacaacatttcaaccagaaacactagccgaagcaaatccattccacaagcacctggtgggatcatctcatcatcagaaaccaagagagagattccgtgtccgcttgttgtagtagattgtgaggactgaggaccgagaagcagccatggctctagttgttaaaggaaaagtgaatatcaatgagtttatcgacctgacaaaaatggagaagatcttaccgtcgatgtttacccctgtaaagagtgttatgtgttccaaagttgataaaataatggttcatgagaatgagtcattgtcagaggtgaaccttcttaaaggagttaagcttattgatagtggatacgtctgtttagccggtttggtcgtcacgggcgagtggaacttgcctgacaattgcagaggaggtgtgagcgtgtgtctggtggacaaaaggatggaaagagccgacgaggccactctcggatcttactacacagcagctgcaaagaaaagatttcagttcaaggtcgttcccaattatgctataaccacccaggacgcgatgaaaaacgtctggcaagttttagttaatattagaaatgtgaagatgtcagcgggtttctgtccgctttctctggagtttgtgtcggtgtgtattgtttatagaaataatataaaattaggtttgagagagaagattacaaacgtgagagacggagggcccatggaacttacagaagaagtcgttgatgagttcatggaagatgtccctatgtcgatcaggcttgcaaagtttcgatctcgaaccggaaaaaagagtgatgtccgcaaagggaaaaatagtagtaatgatcggtcagtgccgaacaagaactatagaaatgttaaggattttggaggaatgagttttaaaaagaataatttaatcgatgatgattcggaggctactgtcgccgaatcggattcgttttaaagacgcatccatggctgaatggttaaagcgcccaactcataattggcgaattcgtaggttcaattcctactggatgcaaagattgctcggctctttcatgtgtacaagtagagtgattcgggaaggtggctcgcctagagcggtgtgctggtttctacctaagaagccaggagggtgaagtgactttgtcatgactagttgagtggtactttaaccacgagtcgtcgttgagacgccagtttccttacaaggaagctgagagggtttttccggtactttacccggaattcgaattgaactgtcttcgacagagttcaaactcctcgctagataccctaacgagtatcttggggactctccgtggagagtcagtaaagacc

SEQ ID NO: 483 - DNA, 1925 bp, synthetic construct
  source 1..1925: mol_type = other DNA
gatatttcgcactcctagtgaatcttcctagtatatccgctgaaaaacgagagaggcaacaaactacagaggttacagtctcaccttttaaacaacagagaaaatggtcggtatgggacaaaaggactcatacgtaggagatgaagcccaaagcaaaagaggtatcctcaccctgaaataccccatcgaacacggtatcatcaccaactgggatgacatggaaaagatctggcaccacaccttctacaacgaactccgtgtcgctccagaagaacacccagtccttctcactgaagctccactcaaccccaaagccaacagggagaagatgacccaaatcatgtttgagaccttcaacacacccgccatgtatgtagccatccaagctgtactctccttgtacgcttctggtcgtaccaccggtatcgtcttggactctggagatggtgtcacccacaccgtaccaatctacgaaggttacgctcttccccacgccatcctccgtttggacttggctggacgtgacttgaccgactacctcatgaaaatcctcaccgagaggggttactcattcaccaccacagctgaaagagcacaacatttcaaccagaaacactagccgaagcaaatccattccacaagcacctggtgggatcatctcatcatcagaaaccaagagagagattccgtgtccgcttgttgtagtagattgtgaggactgaggaccgagaagcagccatggctctagttgttaaaggaaaagtgaatatcaatgagtttatcgacctgacaaaaatggagaagatcttaccgtcgatgtttacccctgtaaagagtgttatgtgttccaaagttgataaaataatggttcatgagaatgagtcattgtcagaggtgaaccttcttaaaggagttaagcttattgatagtggatacgtctgtttagccggtttggtcgtcacgggcgagtggaacttgcctgacaattgcagaggaggtgtgagcgtgtgtctggtggacaaaaggatggaaagagccgacgaggccactctcggatcttactacacagcagctgcaaagaaaagatttcagttcaaggtcgttcccaattatgctataaccacccaggacgcgatgaaaaacgtctggcaagttttagttaatattagaaatgtgaagatgtcagcgggtttctgtccgctttctctggagtttgtgtcggtgtgtattgtttatagaaataatataaaattaggtttgagagagaagattacaaacgtgagagacggagggcccatggaacttacagaagaagtcgttgatgagttcatggaagatgtccctatgtcgatcaggcttgcaaagtttcgatctcgaaccggaaaaaagagtgatgtccgcaaagggaaaaatagtagtaatgatcggtcagtgccgaacaagaactatagaaatgttaaggattttggaggaatgagttttaaaaagaataatttaatcgatgatgattcggaggctactgtcgccgaatcggattcgttttaaagacgcatccatggctgaatggttaaagcgcccaactcataattggcgaattcgtaggttcaattcctactggatgcaaagattgctcggctctttcatgtgtacaagtagagtgattcgggaaggtggctcgcctagagcggtgtgctggtttctacctaagaagccaggagggtgaagtgactttgtcatgactagttgagtggtactttaaccacgagtcgtcgttgagacgccagtttccttacaaggaagctgagagggtttttccggtactttacccggaattcgaattgaactgtcttcgacagagttcaaactcctcgctagataccctaacgagtatcttggggactctccgtggagagtcagtaaagacc

SEQ ID NO: 484 - DNA, 4003 bp, synthetic construct
  source 1..4003: mol_type = other DNA
gatatttcgcactcctagtgaatcttcctagtatatccgctgaaaaacgagagaggcaacaaactacagaggttacagtctcaccttttaaacaacagagaaaaagctgactatgtgatcttattaaaattaggttaaatttcgaggttaaaaatagttttaatattgctatagtcttagaggtcttgtatatttatacttaccacacaagatggaccggagcagccctccaatatctagtgtaccctcgtgctcgctcaaacattaagtggtgttgtgcgaaaagaatctcacttcaaatgaacatgaataatactaaattaagcgcaagggccctaccgagtcttattgattattttaatggcatttatggatttgccactggtatcaaagacattatgaatatgatttttaaaacggatacaggtggtaatctaaccttagacgaaatcctaaagaatcagcagttactaaatgagatttctggtaaattggatggggtaaatgggagcttaaatgatcttatcgcacagggaaacttaaatacagaattatctaaggaaatcctaaaaattgcaaatgaacagaatcaagtcttaaatgatgttaataacaaactcgatgcgataaatacgatgcttcatatatatctacctaaaattacatctatgttaagtgatgtaatgaagcaaaattatgcgctaagtctgcaaatagaatacttaagtaagcaattgcaagaaatttctgataaattagatattattaacgtaaatgttcttattaactctacacttactgaaattacacctgcatatcaacggattaaatatgtgaatgaaaaatttgaagaattaacttttgctacagaaaccactttaaaagtaaaaaaggatagctcgcctgctgatattcttgatgagttaactgaattaactgaactagcgaaaagtgttacaaaaaatgacgttgatggttttgaattttaccttaatacattccacgatgtaatggtaggaaataatttactcgggcgttcagctttaaaaactgcttcagaattaattgctaaagaaaatgtgaaaacaagtggcagtgaagtaggaaatgtttataatttcttaattgtattaacagctctacaagcaaaagcttttcttactttaacaacatgccgaaaattattaggcttagcagatattgattatacttctattatgaatgaacatttaaataaggaaaaagaggaatttagagtaaacatccttcctacactttctaatactttttctaatcctaattatgcaaaagttaaaggaagtgatgaagatgcaaagatgattgtggaagctaaaccaggacatgcattggttgggtttgaaatgagcaatgattcaatcacagtattaaaagtatatgaggctaagctaaaacaaaattatcaagttgataaggattccttatcggaggttatttatggtgatatggataaattattgtgtccagatcaatctgaacaaatttattatacaaataatatagtatttccaaatgaatatgtaattactaaaattgattttactaagaaaatgaagactttaagatatgaggtaacagctaattcttatgattcttctacaggagaaattgacttaaataagaagaaagtagaatcaagtgaagcggagtataggacgttaagtgctaaagatgatggagtgtatatgccgttaggtgtcatcagtgaaacatttttgactccgattaatgggtttggcctccaagctgatgaaaattcaagattaattactttaacatgtaaatcatatttaagagaactactgttagcaacagacttaagcaataaagaaactaaattgatcgtcccgccaagtggttttattagtaatattgtagaaaatgggaacttagagggagaaaacttagagccgtggatagcaaataataagaatgcgtatgtagatcatacaggcggagtgaatggtactagagctttatatgttcataaggacggaggattttcacaatctattggagataagttaaaaccgaaaactgagtatgtaatccaatatactgttaaaggaaaaccttctattcatttaaaaaatgaaaatactggatatattcattatgaagatacaaataacaatttagaagattatcaaactattactaaacgttttactacaggaactgatttaaagggagtgtatttaattttaaaaagtcaaaatggagatgaagcctggggagataactttacaattttggaaattagtccttctgaaaagttattaagtccagaattaatcaatgtaaataattggattcgcacgggatcaactcatattagcggttatacactcactctctatcagggaggaggaggaaatctaaaacaaaaccttcaattagacagtttttcaacttatagagtgaatttttctgtgaccggagatgctaatgtaaggattagaaattctagggaagtgttatttgaaaaacgatatatgagcggtgctaaagatgtttctgaaattttcactacaaaattggggaaagataacttttatatagagctttctcaagggaataatttatatggtggtcctcttgtacatttttacgatgtctctattaagtaaagcacaacatttcaaccagaaacactagccgaagcaaatccattccacaagcacctggtgggatcatctcatcatcagaaaccaagagagagattccgtgtccgcttgttgtagtagattgtgaggactgaggaccgagaagcagccatggctctagttgttaaaggaaaagtgaatatcaatgagtttatcgacctgacaaaaatggagaagatcttaccgtcgatgtttacccctgtaaagagtgttatgtgttccaaagttgataaaataatggttcatgagaatgagtcattgtcagaggtgaaccttcttaaaggagttaagcttattgatagtggatacgtctgtttagccggtttggtcgtcacgggcgagtggaacttgcctgacaattgcagaggaggtgtgagcgtgtgtctggtggacaaaaggatggaaagagccgacgaggccactctcggatcttactacacagcagctgcaaagaaaagatttcagttcaaggtcgttcccaattatgctataaccacccaggacgcgatgaaaaacgtctggcaagttttagttaatattagaaatgtgaagatgtcagcgggtttctgtccgctttctctggagtttgtgtcggtgtgtattgtttatagaaataatataaaattaggtttgagagagaagattacaaacgtgagagacggagggcccatggaacttacagaagaagtcgttgatgagttcatggaagatgtccctatgtcgatcaggcttgcaaagtttcgatctcgaaccggaaaaaagagtgatgtccgcaaagggaaaaatagtagtaatgatcggtcagtgccgaacaagaactatagaaatgttaaggattttggaggaatgagttttaaaaagaataatttaatcgatgatgattcggaggctactgtcgccgaatcggattcgttttaaagacgcatccatggctgaatggttaaagcgcccaactcataattggcgaattcgtaggttcaattcctactggatgcaaagattgctcggctctttcatgtgtacaagtagagtgattcgggaaggtggctcgcctagagcggtgtgctggtttctacctaagaagccaggagggtgaagtgactttgtcatgactagttgagtggtactttaaccacgagtcgtcgttgagacgccagtttccttacaaggaagctgagagggtttttccggtactttacccggaattcgaattgaactgtcttcgacagagttcaaactcctcgctagataccctaacgagtatcttggggactctccgtggagagtcagtaaagacc

SEQ ID NO: 485 - DNA, 1786 bp, synthetic construct
  source 1..1786: mol_type = other DNA
gatatttcgcactcctagtgaatcttcctagtatatccgctgaaaaacgagagaggcaacaaactacagaggttacagtctcaccttttaaacaacagagaaaactcttgagtactttcgccagctcacgttgacttttttcgctatcactcctttttagtgtcaaaacgtaggggtcttcgaaaatgttgagactttgcacaatctttctcaggctcgccacagttttcgtcacgatgatatttgactctggggtatagtagataatagatagaagtggtagctttactcgaaggcgaagatctgctcgatgtatttttggcgtgcagcaaatggcatccgatcctagagttctactggcttctgtcccaaatacaaatggcttccgaaagataggattgtcttttagaagcgggagcatttgaagataaagaggagtattgaatttcgggagcacaacatttcaaccagaaacactagccgaagcaaatccattccacaagcacctggtgggatcatctcatcatcagaaaccaagagagagattccgtgtccgcttgttgtagtagattgtgaggactgaggaccgagaagcagccatggctctagttgttaaaggaaaagtgaatatcaatgagtttatcgacctgacaaaaatggagaagatcttaccgtcgatgtttacccctgtaaagagtgttatgtgttccaaagttgataaaataatggttcatgagaatgagtcattgtcagaggtgaaccttcttaaaggagttaagcttattgatagtggatacgtctgtttagccggtttggtcgtcacgggcgagtggaacttgcctgacaattgcagaggaggtgtgagcgtgtgtctggtggacaaaaggatggaaagagccgacgaggccactctcggatcttactacacagcagctgcaaagaaaagatttcagttcaaggtcgttcccaattatgctataaccacccaggacgcgatgaaaaacgtctggcaagttttagttaatattagaaatgtgaagatgtcagcgggtttctgtccgctttctctggagtttgtgtcggtgtgtattgtttatagaaataatataaaattaggtttgagagagaagattacaaacgtgagagacggagggcccatggaacttacagaagaagtcgttgatgagttcatggaagatgtccctatgtcgatcaggcttgcaaagtttcgatctcgaaccggaaaaaagagtgatgtccgcaaagggaaaaatagtagtaatgatcggtcagtgccgaacaagaactatagaaatgttaaggattttggaggaatgagttttaaaaagaataatttaatcgatgatgattcggaggctactgtcgccgaatcggattcgttttaaagacgcatccatggctgaatggttaaagcgcccaactcataattggcgaattcgtaggttcaattcctactggatgcaaagattgctcggctctttcatgtgtacaagtagagtgattcgggaaggtggctcgcctagagcggtgtgctggtttctacctaagaagccaggagggtgaagtgactttgtcatgactagttgagtggtactttaaccacgagtcgtcgttgagacgccagtttccttacaaggaagctgagagggtttttccggtactttacccggaattcgaattgaactgtcttcgacagagttcaaactcctcgctagataccctaacgagtatcttggggactctccgtggagagtcagtaaagacc

SEQ ID NO: 486 - DNA, 2194 bp, synthetic construct
  source 1..2194: mol_type = other DNA
gatatttcgcactcctagtgaatcttcctagtatatccgctgaaaaacgagagaggcaacaaactacagaggttacagtctcaccttttaaacaacagagaaaaagctgactatgtgatcttattaaaattaggttaaatttcgaggttaaaaatagttttaatattgctatagtcttagaggtcttgtatatttatacttaccacacaagatggaccggagcagccctccaatatctagtgtaccctcgtgctcgctcaaacattaagtggtgttgtgcgaaaagaatctcacttcaaatgatgaatgctaatggatttagcggtgtggagaaagagtatataaggaaacatcatcttcatcagcctaaggagaatcaatgcagttcgtttttagtcaagcacattcgagcacctgttcatcttgtttggtcattggttaggcggtttgatcagccacaaaagtacaagccctttgttagcaggtgcatcgcgcaaggagatcttgagattggtagtcttagggaagttgatgtcaagtctggcctccctgcaacaacgagtaccgagagattggagcttcttgatgatgaagagcacattttgagtttcagaattattggcggggatcacagacttaggaactactcctcaatcatatctctccaccccgaggtgatcgatggaagacctgggaccttagtaattgaatcatttgtggtggacgtgccccaaggaaacaccaaagacgagacgtgttattttgttgaagcattgatcaattgcaacctaaaatcacttgctgatgtctcagagaggcttgctgtgcaggacaggacagaacccattgatcaggtctaaagcacaacatttcaaccagaaacactagccgaagcaaatccattccacaagcacctggtgggatcatctcatcatcagaaaccaagagagagattccgtgtccgcttgttgtagtagattgtgaggactgaggaccgagaagcagccatggctctagttgttaaaggaaaagtgaatatcaatgagtttatcgacctgacaaaaatggagaagatcttaccgtcgatgtttacccctgtaaagagtgttatgtgttccaaagttgataaaataatggttcatgagaatgagtcattgtcagaggtgaaccttcttaaaggagttaagcttattgatagtggatacgtctgtttagccggtttggtcgtcacgggcgagtggaacttgcctgacaattgcagaggaggtgtgagcgtgtgtctggtggacaaaaggatggaaagagccgacgaggccactctcggatcttactacacagcagctgcaaagaaaagatttcagttcaaggtcgttcccaattatgctataaccacccaggacgcgatgaaaaacgtctggcaagttttagttaatattagaaatgtgaagatgtcagcgggtttctgtccgctttctctggagtttgtgtcggtgtgtattgtttatagaaataatataaaattaggtttgagagagaagattacaaacgtgagagacggagggcccatggaacttacagaagaagtcgttgatgagttcatggaagatgtccctatgtcgatcaggcttgcaaagtttcgatctcgaaccggaaaaaagagtgatgtccgcaaagggaaaaatagtagtaatgatcggtcagtgccgaacaagaactatagaaatgttaaggattttggaggaatgagttttaaaaagaataatttaatcgatgatgattcggaggctactgtcgccgaatcggattcgttttaaagacgcatccatggctgaatggttaaagcgcccaactcataattggcgaattcgtaggttcaattcctactggatgcaaagattgctcggctctttcatgtgtacaagtagagtgattcgggaaggtggctcgcctagagcggtgtgctggtttctacctaagaagccaggagggtgaagtgactttgtcatgactagttgagtggtactttaaccacgagtcgtcgttgagacgccagtttccttacaaggaagctgagagggtttttccggtactttacccggaattcgaattgaactgtcttcgacagagttcaaactcctcgctagataccctaacgagtatcttggggactctccgtggagagtcagtaaagacc

SEQ ID NO: 487 - DNA, 19296 bp, Citrus tristeza virus
  source 1..19296: mol_type = other DNA
aatttcacaaattcaacctgttcgcccagaaaatacgtctggcacaacagggatccggaataggtccagcctttaagctctaatattcccacaacaaaaattacactatgtcgaaactcagaggaagcttctggtcttcggccatcgctgttaacagcgattacacgatatcgcgcatctggcgcaaacttaacaccatagtagtcctgcactactttggttttgttagaatcaccaaggtgattcgtgacaaatcggctgatatgccgatagtccctttacggaaatctgtatttccgttttctgttcgcgcggctgtcacgagcttcgtgctgctgggcgtcctcttgacgctccgcattcagggtgcctctgtggccttcccgttatcaacgcatctggcgttgttcgtccccgctctgttcgcgggtttttcgaggttttctctgtgcaaacctccgctcacctctgccgctaagaggtccctccgtcaggcaaagcgggaatctgtttccctttctagccgggcctcttctcgcttctctagggaagtccctcgcggcacacgttcaagacttcacagacgtgtggtgagacgagctgacactgccccagttgagagtccccaagacaagcctacccgacgaaacagccgacttggtaagacttctcacctcccttacgtgggggaggcagcgttggatgatatccttcgctggatcgaagaggttaatcctcatccctcgatggtcgctattccagtgcccatcacttttggaaccatgcctgcaacggcttggtgttcccactctgaagccgcagttttgcgtgccgccttgactatcacgcggctgaaactgatttctccactcaggagaaacacgtacggtacgtctataatgacgtatcttctgccactaaccgtccccgtacggtttctccccgcaagtgcgtccatttttcccagtaaatctaaactgggcgttgaggtcccctctggtagggaccttcacactgcgttcgtgagatcttctcacgcgagcgctttcttctctgacgcggttcgcgcttcgtttgttccgtccagcgcggaacaattttttcacttccgtcgtcagcggacgcatgttcttgctattacagacccggtcctgtgtggtacggtgtctgttttaatgtcggacggtgttaacacagcacgtctcgacgttgttgctccggcgtactatgcgtacgctgaatctttgggcgccagagtgcgctttttgtgggagtcgtccgacgtggacgacgctaaagttcgtgacggtcaatgttatgtccgtcatgtgttcgacgtggctctctactttgggagacgcgccgacctttccgtgcgtagagcgctgggtatgtaccccacagtgggtgcactaaaggcttatcttgttcgcgaatacggtcgcgactctcttaaggttcctatgcgtgggacctacacttttggcagtgtgtttcactgcttgtcgctaaatcttcaagtcgacctgcgatctattcctaaccatcatttagttggtgggacgtctgcccacgtcttaattgggcaggttcgagtcagtgttcctggctcgattgttaaaccttcacgttcggccgttcgtaggcgtaatagacgcatgcgacgtgatggttttctcggtagttccggttcttcttcttctgcgggggagtcgactcgctgttcggactgctcttctcctcgcggtttaccttctccttccgttttaaaaccttccctaggtcggatcccgagtatagatcggcggttccggtttcctgcgggtacgcagttgcgcgtctccgtacctaggcgggtcgatgaccatgtttacgtgtcgactggtagcaacttcgatgagttgtgccatgcagttttgacacgtatgtcaaaaggtacaactctagaaatccttttacactcgattcgagagcggaagggactacttggttttgcggcgtgcttccgttgggggtcttcacacgtgtttgtaaagcgtggcaactttactgcccgatttcctatttcggcggtcaggtatgagaatcagtatgccgcggttatgatggatgtggggactagttgggttccgaagggctacgttcccgatgttgatgttgtgaaacgtcggagaagtcgtaatcgtcgttttcctctttcccatcgtgcggtggatcagtcggtccccgcgttacagtcgagtcctgtcgaggttgcttcggtttcgagtgataagccttcatcgtcgcagaaggcttcttcaccttctacttcttcttcttcttcttttaactcgacaaggagttcagactgggtgaatgtcggtttctctcatcgaactactaataaggttcgtgaaccgcgttatgctggtcatcgtaggatcggaaattttactttcccgaggggcacagtgtacaacacgcctgtcgatgagcgcgcctataaacgtgttcttagattgcgagataccacagcctgttcctttctccgtatactgctagctcgtttgtcgggttacagacctttaagtgacgagttctttaacaagtgtgtcacttcccggtttgtcgcgtgcattgaacctgtggaatcaggtctcgttaaggtgcatttccgttctgatgttttccgtgcctctttcccgtttgacggtcaacctatacaccccgccacggctttgacattggaagtggtggtctcttgggattggatggttacggcttttcagaatcccttgaaggatggatattgctacattcgccatttcgccgaagttagtttgagcatggggcgaattttcttcaggagggacgtcgacttgggacctttcccatacgttttcgaagtgcaacaccgtcttgaaaggttgtacgggaaagctgcgttaagatacggtgttaggggtcaatattcagccccgcgctgttttcactgttgctacaacgattcaccgagaccgatggcgtcctttaatgggtaccataagatgggtggtgaagataactccctgataatcacagacaccgacaggttgcgtgctgtggggagtgcctatgaaaaagtgaagagaaacataccagattcgttattggttcggtctgtagaaaaggaccttatagagtttaatcagactctagtcgacatgcatcgatccagaccgggcgttgtcgtacctttccaaatgagtgagaatcagcaagtgatgcttactagggcgtacccggaatttaatattaattttattcattccgtacattccgatcatccggtggcagcaggttctagggcgttggagaatcatctcgttcgtaaacacgctggtaccgattattcggatgtggggggttgtccgctgtttcatttacgtgcgggtcactccggcgttcacgtttgtagaccggtgtacgatgttaaagacgctcatcgtagagtagtccgtcatcaccaacttagtaaggtttcgctagatcagagtgacggtgttaaacaagttggctggaccgtaaacacgaattctgtatgcggtaacattttgggagagtgttatcatgcatcggaggcgatggttatggttcaagtttatgacgtaccgctacgtgagttgtgtagggctatgataaacaagaaaacttccgtgtgttatatgaccatggttacacctggtgagttgttggacgcccgcgagtccttttttattaaggacttggattgttcggttgagttagatcccattgcagacagggttgtttactgtttcaacaattctgcgtatacacacacgtactccactatatgtgagtgtatgcgaactccttgcttggtagtggacgggtttttgtttactatcgaaatggtatcgctcaggtgtagcgttaattactattgtatcaccaagtcgtcggtctgtccgagaattagtgagactaagcggttgcgctaccgtcggtgtgatagcgacttgattagaatcaaaattccccggtactccagtaagactcgtagttgtttacctgggtgttactatttgtacttggacgccaagtttgtaagtcgcgtgtacgagtacgtggtcaataactgcgttgtggtgaacgcgaaaacttttgagtggacttggaattacatcaaatcttgcaagtcgagagtggtgatcagcgggaagattatacaccgagacgaaccaatcgctttagagtacttagatgggttttctgcggttatgctgtccgctggcgtgaagggtaggcaaaacgcggacgtttctagacgcttagccgctttttcgggtgaaacttcgattttcgagttagtggggtttgctatatccgagaagtgccgcgacttgttcttgggtattcaggacgctgtggaaagatgcgtgaagtcgtacctcaggaattcgtttaatatgagtttcgtggacttgtccgaccccttacttacgattagcgaatattcagaattggacgttcctatcgacttaccgggtttcggtggaatagtggacggtaacgaaactagacttatggaagacggtgttaaatcggctttattacgtaaagcggttcaagccgaggctcagttgagtcttaagagaggcaatacttccgaaatcgttccgtgtgatgacgatgacgactcgaacggtgatgattcgcgtgtttcgctcgatacggactggtggttcgtccttcggggtggtagttctggcgggttgcgagctggagccgccccttctttgtttaggtgtttactcaggaaattgggtgggggtttatgtttggcaaagaaagtgttggaactgttagtcaagcgggtggttgaatcgttttctcgtttgaagcggaaaaccgctcgtttaacgtccttcgctaatttgttgcttgcgaggctctcttgcgggtttttcgatgacactgttttttctgcggtctgggaaatagcgatcaacctgaccaggatcgtcgatggagtagtcaagacaaaactggggtgctttcgtaatttatttcgattgattcccaagttatacgctggttgtaaggacgttgtgaaggacgttagtaacgcttacaggtcggttgtctcgttttccgctgaggttttgggtaagagttactctaaactttgtcagttttgcttggaaatatttgacatcgggcttattgaggtttctgctcgtaatttgggactggaaacatgcgtttcaatagcactagctatttttgatgtgttgattacttttcctttggggagcgttagttttcccgtcgtttgcgctagggttttcggtcgtctcgctatggaagtgggatcgaactttttgtttaagaaagttttcggtaaacccgaaactcttggtgaagatactttccgtaggactgtgagtatggttttgaggcccaaagcgtttgacaagctttccgtggatgcgaaaggtttagttaggtgctctggtgttattcctggagtgttaaggataatactatcttccttgttttccgaagatgacgcttgggtgggttatagtaaacatgaagtttcttcccttcctattgttaccttttgtgtgaagagattgtcttattctctggagcggtgtaaggaagcgtgtgtcgcatttattgttgactctgctaagaagattttgaaatctttaacttcagagttcaacgaatccattcaaaactccgacttgaccagtggtgctaagtccttgtacgggcacgtgagctcgatactttacacctctagtggtgtgattaataaagcaggaagcgccgtcgctactgttaaagcggtcgggagtgatatcagtggtcgtgtgaaacgtatgcgaccccgattttctctgtcccgtcactttgacgagcagactagtgagtactactctgctagcgattgttccgaactagatgagtcgttgtttagtgaaacgcctggtcttcgtggaaacgccaggtgtagagatttgtttcgtatcgtgtctagacgcgcggtagcgtgttgtgagtacgtgacaattcttttgaaacggctagcgtcgcgtgccggtgaatactcctactcgtatgtgatggatacgctcgtgagattgtatgtggcgaccgatgatgttgttagacggtgcaggtcctttacgttcgactgtactgataaagcatctaatttcgtcaccgggtttcttagttggcgcagcttacgttctggtgcgtactctgcaactccagggttgggtggtggtagtagaggtttaacgtcgttttctcacaccggtggattcacgcgcgttatcggcgctcttgggaacaccttatcggtggtgtttgatgaggaattcttcagaactttgctgcatcggttgagggcagatgttgtggttttactggtggagttcttgaaaaaccttcccgtttgtttgttttcaatatacacttttattgaatgtcggggtaggatctttcctttaagagagttcctatggggtttttgtcgtttcgtttgggatgttatcgaggggttgtccatcaatacttatcaatacctctctgctgtcgctgagaaagtgtatcgaggtgcctttaatcgtcgatttaacgaagaggatgagaggacgcttcgagtgatcacggaagcagagggaagaatcgaatttttgcgagttgttctcgcggaaatggaaaggttccgtgctgcgtcgaacgaggtttcttcgtcgaggtcgtctgatagtccttcattcccacctacttacggtgaaattgaggagttaaatgatgattcctccgatagtgcgctagtgataggcgtcgacaacggtaccggccgcactatcgttgacggtgagaccgattctgcgtccggtagcgatagtgacgtttctatcccgttggatcgcgattttgaacaaatcgggcgtcttggcggaaacggtaacgtcgatgtcgttcggctgggtttgaaattcgttctgaagttgttacgcaacctattcgatgctagaagttttaaagtgttgtatgggttgttacttcaaacccttttttatggtggttcggtaaataaatttgtgtgtcgtctggtctttagtcttgggacttgcttacctttcgagttactccgatttgcgtgttcagcgaggcggttgttgaagagtttggcatcatttgtttaccagactaaccttttcagcgaagttatggtggagcatttgtttagcgtttcccgactgctttatgattcccggtacttcgcgactgtgttttcggaattggagagacttaacttctatttagactatttcctttcgctcccgaagagatatctattccctaattctagggctcgtagttgtgctagggttccggttcccgtgattaggaccgaaggagtggcaccagtccgtgagagatcactaaatgacatactggactctttagactctttaaaggtgtcggacctcaaagggaagtcgacgttcgttgatgatggggagtcggattccggtagtgaacattcgggtagttcgatttcgttcggttccgtcaacgaagaagttttaaatgcggtaaatggtgacagcgtttgcgaaaaagccccgttgatgaagcatgttaccgcacttagcaggttggaacgccaccctagtggtcgtaaagacattcctgtttctaggaaaacttttgtgcgtggtgaatcttcgggtgtgaaatcgaaggtgagtatgtgcgattacttggtgaccttgaattcttcgtttggcacagtgcctgacatgtaccctgttgcgcgtgacataacgtataagaaactgactaacgccatgcgcgaattctattactcgcaaaaaataaccttgtacgaacttcacgggaagttgagttcctattgggacgagttgaaggtcgcaggtttcgatagaaagttaacgagaatggatttggacgatgatgtctatgttgttgactttaatcggaaattgttggtggggagaaacggatctcatccgtttcgtaatacgttaaagtcctattgttttatgttttgtaacgatgggttggttccttgcccgcgttctcagaaatatgattatgctttgatttctaatcaaacgtcttttgttgccgcgaattcgttcttacgtgccgtggatggtaaggatttgacttttaccaatgaggaacatagccttatcgtttatgaagctcctcccggtggtggtaagactcattctttggtgaattcgtacgcggattattgcgttaaagtatcttgtttagtagtgaccgctaacaagaattctcaaaccgagatatctcagcgcatatctaatgaattgatgggcaggaagctagctgctaagtatgttaccgatgcagcttccagagtgttcactgtagattcttacttaatgaatcacttgcgacttacgactcaactgctgtttatcgacgagtgcttcatggttcatgctggggcaattggagccgtggttgagttcacgtcttgtaaagcggtggttttctttggtgatagtaagcaaatccattacattcaccgaaacgatctcggggtttcctttgttgcagatattgatgcgtttattcaaccggaacatcgtatttacggcgaagtgtcctataggtgtccttgggacatttgcgagtggctttccgagttttacccgcgacacgtagctactgctaatgtagggagtattgggaagtcgagtgtgtcaatagaggaaatcaatgggtgcgatgacgtaccttacgacaaggcggcgaagtacattgtgtacactcaggctgaaaagaacgatttgcaaaaacacctcggtcgcttaaccgtgggtcggaacaaggtagtaccaattgtaaataccgttcatgaggtacaaggagagacctataaaagggtacgtctggtgaggtttaagtatcaggaggataccccgttctcttcaaagaatcatattgtggttgctttgactagacatgttgattctttggtttattccgtacttactagtaggaggtacgacgatactgcgactaacatagatagggcgaaggaaatttttgacaaatttcgttcgtcgaatcactcgtacggttcgtcatcgttagagtggtaccttgaaaagtatcctaccgaatataagggtagtaaagcatcctctgctccgataagttgcattaacgaatttcttaatgaggtcgtcgttggttcttctgtcgtgcagttgggtgatgtgtctgaagaactaagttcacgtccctttgaatcgggttgtgataatgttactgtaagagacaccgcccctcctgactcgggtaacttacacgaaccggctcgcgttcggcgtagtaaggtcacaagcaattcctccaagaaaagcgtcactgcaagaaaaccttctgtcgtacgaaagtcgtaattataactttatcaagacggaacggtttgttggaccaagcgaatttggtagggcgatggctgctgctgttatcgaacgttgtttcaaaatggaagagatggctaagataaggtgtgatattatatcccttactgaagctaacattttaaaatggctcgataagcgcactccctgtcaaataaaggccgtacacggggagttgaaacttcccttttcggtggaggagcaaatttccaacttcaaactgatggttaaacgtgatgctaaggtaaaacttgacgattcaagtctatctaaacatcccgctgctcagaacatcatgtttcataagaagtttatcaatgccatattttccccgtgtttcgacgagttcaaaaatagagtgttgtcctcgcttaatgacaatatcgtgttctttactgagatgacgaacgctgggttagcggaaattatcagaagaatcattggtgacgacgacaacttatttgttggggaagtggatttcagtaagttcgataagtctcaggatttgttcattaaagagtacgaacgtacgttgtattccgagtttgggttcgataccgaacttctcgatgtgtggatggaaggtgagtatcgcgctagagccaccacgctggacggtcagctgagtttttcagttgatggtcagcgtcgttctggaggttcaaacacttggattgggaattccttggttactctaggtatcctttcgttatattacgacgtttcgaagtttgacttactcctcgtttctggagacgattctttaatttattcgagtgaaaagataagcaacttttcttccgaaatttgcttagaaacaggttttgagactaagtttatgtctccgagcgtgccatatttttgctcaaagtttgtggttcagaccggtaacaaaacgtgttttgtgcctgacccttataaattattagtaaagttgggggctccacaaaataagttaaccgatgtcgagttatttgagttgttcacttcttttaaggacatgacgcaggactttggtgatcaagtggttttggagaagctgaagttgctagtcgaagctaagtacggtttcgctagtgggaccactatgccagcattgtgcgctattcattgtgtgcgatcgaactttctgtcctttgagaggttatttcctttcattaggggttggtatgttgttgacgctctaaaactcagacagcttaggaaactcactaatttgatctgtgaacgtgtagtttacgacaatcgggtgagttatttttcgtacttcgataacccgttcactaaacctgacgctaacgacgataacgtggacgacctcggacaagcgggtgaattagcaaccggctgatcgattgattagttctcgctgagagctaatgtgggtagttgagtcaggatgtttgccttcgcgagcgaaagccaagacttgttagaagaaaaagtttttcgtcgtagaacttaccatcgtaaatattttggtgacgtggttaaggacttcactatcgatattggttatgatactaccgatcgcgatcctactgtattggccgattatttctcattgtatttctttttacttaacaacgatagtgttgggcctatagcagcctcaattgtggtaagcccaccggttagcgggactcataaaattcgagcgcatatcgataatcaaccgaactgtgaaggtaacgtgacttacgttaaaaccttcgacaaaagtcgctttgtgattcgcgttaaagcgtccccgtctatgagaggttactactcttttcgggtgtttcttagtagcgatgtcgctagcgaacgcagcgagttcgtgtgcagttttgttggtagcaggtttctttgctgttgtacacaaacgatatctgaaaatttgagtaaagtttgttcatcttccttcttcttcagagcagtttcagaaaccgcgaccaacgaattttctgttgcgactgatgatgtggaagacgttaagtacataagaaaacaagccgagggtttttcacgttgcgctgacccataccctcctaggtgttatcgtagcactaatttgggcgattcttcaggggttcagagtcgtacgattgaagaggaaggttatatgacgggcactgcaggtaacgtcgcagtcaccgtcccgaatactccactagttagtgctgtctctccgtatatcgcagggtacaacgagaatgcacgctcgcgcgtctcattaatacgccgggtctgttgttacgccgtttgcgttttagtggtgtccgttcttataatgagcggtttattagccattatatttatatgatttagtgtagtaactcataaggtacaattacttacttaagactcgccgtttgactctgtttaaacggggtttaatggactgcgtaattcaagggtttttaactttcctagttggtatagctgtgttttgtgcctttgccggactgattatcattgttataacaatttatcggtgcacgattaagcccgtcagaagtgcttccccttacggcactcacgcgactgtctaagcggtatggtgcttttgggtttagacttcggtaccacgttttcaacggtggctatggctacaccttcagagttagttatactcaaacaatccaattcatcgtacatacctacgtgtttactcctgcatgcggaacctaacagcgtatcttatggttacgatgcggaatatttagcggcttctggggagtctggttcgttttacaaagatttgaagcggtgggttggttgcactgcgaagaactaccaaacctacttacacaaactatcaccttcctataaggtgatagtgaaagagtttggaactaagagcgtgccggtgccatatttgtcacctctgaataacgatttaggactcagcgtcgctttaccttcactgattgcttcgtatgccaaatccattctgtcggatgcggaacgagtgttcaatgtaagctgcactggagttatatgttcggtacctgctggttataacacgttacaacgagcttttacacagcagagcatatcgatgtcgggttactcttgtgtgtacattattaacgaaccttcagcagccgcgtactccactttacctaagttgaattcggcagataagtatttagccgtttacgacttcggcggtgggacttttgatgtctctatagttagcgttagattacccactttcgccgttagaagttcgagcggtgacatgaatttaggcggtagagatatcgacaaaaagttatccgataaaatatacgaaatggctgattttgtgccgcaaaaagaattgaacgtttctagtttaaaggaagctttatctcttcaaaccgatccggtcaaatatactgtgaatcattacggaatgagtgagaccgtatcaattgatcaaacggtgttgagggagatagcctcggtgttcataaatcgaacgatagatatacttacgcaagttaaggttaagtctagtatgcccgaatcgcaaagtttgaagttagtggtagtcggtggaagctcgtacctaccagggttgttggacgctttggcaaccgtgccttttgtgtctgggatagtgccggtggaagacgcaagaaccgctgtcgccacagggtgcgctttgtatagcgagtgcttagatggtaggtctaaggccctactaatagattgtattacgcatcatttgtcggtcacgacgtttagcgcggattcggtcgttgttgcagcggccggtagtccaattccttttgaaggtgaacaaaaactcacgttacgcaaatgcgttagtacgtctaactatcaagcaagaatgttcgaaggggattacgaaaaagttttccgaaatgaacgtatatacgcagcttcgatatcattgtttacattaggagttaattggagtgtgcctaacgacgttgagatgactctcgtgaccaaagtggactcgatgggtaaagtggaattttaccttaaaggtccatctggtgaactggttaacgtgcaaggtacttcgcattacgattatgctggtatgcctcaccccactagaaagctggtgaggcttagcgattacaatgtaaactccgccgctttagttttagctttgacattaactcgcgaaaaacgagaaaagttccttttgcgaacattatttgacactttactagcggatttacgaaagacagcaagtttaggcgagtactcaaagaagtacccgatcactcgaaacgatatcgatgtcgtctcatcacgtatggggatcgttgtttcgaaagttttacggggaagcgatttggaaagaatacctctctgaatcaactcgaaatttcgatgaaagaaatgtatcgttagaccacactttgagttcgggtgtggtcgtccgtaggcagagtcttttgaatgcgcctcaaggtactttcgagaacgagttagcgctattgtacaattcggtggtgattaacgattttgttgagttgactggtatgcccttgaaatctttgatgacaggtatcgaagaccgtaaggtacctgacgaattaatatccgttgacccgcacgaagtcggatgtagattcacgttaaacgacgtggaatcgtatctaatgagcaggggtgaagatttcgctgatctagcggcggtcgagcattcgtggtgtttgagcaactcttgtggtagactattaagttcgactgagatagatgcttacaaaaccttggtgtttactaagaattttgatagtaatgtatccggagtgactactaagttagagacttatctatcgtactgcatatcattgtacaagaaacattgcatgaaagacgatgattattttaatcttatcttacctatgtttaattgtttaatgaaagtgctggcgtcgcttggtttgttttatgagaaacatgccgacaatccgctactgaccggaatgctcatagagttttgcctagaaaataaggtgtattactctacttttaaagtgaatttagacaacgtcagattgtttaagtctaaagtgttgcctgtggtgttaacggtttgggatatatccgagcctgatgacccaatggatgaaagggtgctgattcctttcgatcctacggatttcgtgctcgatttacctaaattgaatatacacgatacaatggtggtggtgggtaatcaaatcagacagttagaatacgtagtcgaaagcgatgctttagacgatctatctcaacacgttgatttacgtttagcagcggacaatcccgatctacgcgttggtctgcgttgggcagggatgtttgtgtactacggtgtttatcggtgtgttgttgatagagcggtggaacgaccgacgttgtttagattgccgcagaaactactgagtcaggatgatggcgaatcgtgctcattacacatgggttccgtcgaagctttattcaatctggtgcagaaagtgaacaaggacataaacgttagacgtcagttcatgggacgtcatagtgaagtggctttgcgactgtatcgcaacttaggtttgaggtttccaccgatctcatcggttaggttaccggctcatcacggttatttatacgtcgatttttacaaaagagtacctgacggtgctgttaccgccgacgaactcgaaagtttacgtcaattacgctcatccgtggacgttatgtgtaaggacagggtgtcaatcacacctccaccattcaatcgacttagaagaggttcttctagaacatttagaggtcgaggcgcacgcggtgcgagctcgcgtcatatgagcagagacgtggcgacttccgggtttaatttaccttatcatggcaggttatacagtacttcctaaaaccgatgataaagaaatggatcctgtgagtgctgccgtgcccggtaagtatccggatgtcattgaaaagttcgtggccaataggtccgtagatgcgttaatagaaggcgttataagtaaattggataccaattcaatatacgaagattccactgaaaagtttactggtgaacacttgaaatacgttatggttactatggacactttcttattagaaaactacaaaacgaaaacggaagatctgttggttcacttaactatgatccaaaagaggttatacactatatccacgagcactaaaaccaagtttcgcgataaaggttgtattagttacgtacaagggggtttacgatataagttgttggacaaagtagtttttcctttcattatatcgaaatttaccgacagggagactccaaacgctctacgtaagtttgcttgcactttcgaggagttacacttgtgtatggctaggttaagacccgacttatacgaaaataaaaggacgaccagggctgggactccacatttaaagggctacctatcagctgactttctctcaggttctctccctgggtactccgaacatgaacgaggtatcattcttcgagcgtccgagtctatgttagctagacgtcaaggttacgaggaggcgaccgagcttcttaacctacgcgatttgggtaagtacttatagttggtttggggacggtaacattatactatcccatgagcgctgccttaagggtcgttaattgacgacttttgatatatttactaggtttgaattatggacgacgaaacaaagaaattgaagaacaaaaacaaggaaacaaaagaaggcgacgatgttgttgctgccgagtcttctttcagttccgtaaacttacacatcgatccgactttgataacgatgaacgatgtgcgtcagttgagtacccaacagaacgctgctttgaacagagacttattccttactttgaaagggaagcatcctaacttacctgataaagataaggactttcgcatagctatgatgttgtatcgtttagcagttaagagttcatcattacaaagcgatgacgacgccacgggtataacgtacactcgggagggtgttgaagtggatttgtctgacaaactttggactgacgtcgtgtttaactctaagggtattggtaaccgtactaacgcccttcgagtttggggtagaactaacgatgccctttacttagctttttgcagacagaatcgcaatttgagttatggcggacgtccgctagacgcagggattccggccgggtatcattacttgtgtgcggatttcttgactggggctggtttgactgatttagaatgtgctgtgtacatacaagctaaagaacaattattgaagaagcgaggggctgatgatgtcgtagttactaatgtcaggcagcttgggaaattcaacacacgttgatctgttgcgttccgattcccggtttctatcgggatggtggagtttcatcgtgaacgtgggtgatataatcgtccggttcgcgttacacgttcctaatgaagatatgctgaatagtttttcagctatatcgaattgtacgattatagcggacggtagtgctttactaaaagataatactgtggtcgatcgtttagaaggcatgaatcctttggcttatttattaaaattagcgaaaacgactactactatttgttttactatgtctaataaggttctttttggtactactaaatccgaaccacttagttgtttagctatcacgtcggatcgagttttattcaaagttgttatgggtactaacgttgacgattctcgatgcggctgcagtatttggttttacaacaacggtacgtttcaaaatggattgatccgttgtaataatctcgtcactttgtttagcgtgacttagacacgaagtgactgttcggattcaattgctgcaatgagcattcggcgctcgtggttaaaggttatggctgtagttacggtattatggtacggtaaagagccttccattagtgaaggttacaatgctctcatgaatgatgactttaagtttatcgatacgcattttacaaacgtttcttacgctaagaaatgttacgatttggctaatttcgatttagactttctacgcatcgttatcattcctttgagtgggggtacggtgaatgaatcgcgtgctgatcgcactaacgtttcagaaattgtcgaatcgcatgtgagcgaccgagacaggatgagcatcttgttgcgtaataagcggatccaaattccttcgctcttaccttgcgataactagagtctactcagtagtacgtctattagtataacgtattaagcactttagtaaagggttttgtttaaatcaaacaatatgcgagcttactttagtgttaatgattacataagccttttggctaaggtcagcgctgttgtggaacgtttatgcgatcccagcgtaactcttgcggaagtgatggacgaaattaatgactttaactcgtttctcgctttagtgcactctatgaagtcagacatgaacggagaccatcaggatggccaccacgagatgggtgaacacaagtctcggttgttatgcaacatagaggcgaaattgcgagtacttctcgacatcataagacgtcggttcactcgcgacaagctgctctgtactagcgcgacagatgtcatgggcttctttgtaatgaggtacatgagttctagccacaccagcttcgaatccgtaatgaggacggagttgaggttggtggttaaggcggtactgtcggatttatcccgcgcgcataaactggattttagcgagcgagcttttgcggcttatggtatccttttgcaaaagggtactgtgtcgaccgtttgcggtcagtttgacattaatttagtctctccatcttgcgtgtaggttaatacgcttctcagaacgtgtggttgtattaactaactttaattcgaacaaatatattgtgaaagtctgcgagttacaatggataatactagcggacaaactttcgtttctgtgaacctttctgacgaaagcaacacagcgaccactgacgtcgaacccgtgagttcggaagcggatcgcttggattttttacagaaaatgaatcccattattatcgatgctttgatacggaagaatagttatcagggcgctcgctttcgcgcgagaataataggagtgtgcgtggattgcggtagaaaacacgataaggggttgaagactgaacgtaagtgtaaggtcaacaatacgcagtctcagaacgaggtggcgcatatgttaatgcacgaccccgttaagtatttaaacaaaagaaaagctagagccttttctaatgcggagatatttgcgattgatttggttatgtacaccaaggaaaggcaattggctattgatttggccgctgaaagggagaaaacgagactggctcgtagacacccgatgcgttctccggaagaaactccggaatattataaattcggtaggactgctaaagcaatgttaccggacatcaacgccgtagacgttggtgataacgaggaaacttcgtcggagtatccagtgagtctgagtgtttctggcggagttctccgcgaacaccacttcatctgattgaagtggacggaataagttcctcgcggaactttgtgttgggttggtaaagacccttatgatggtgatatatcactagacaataaccggatgggtaaagtctttaaaatgatcgaggggaaaattaaccgtatcctctcgttggtctaagctcccacagagtggtagtggtctcaagtgaggcttaacgtatgcgtgaaccaaagaagttctccttagagtgtgtgttgtttacccaacgcactgtccctatggggggccaacataggtcca

SEQ ID NO: 488 - DNA, 3439 bp, Spinach latent virus
  source 1..3439: mol_type = other DNA
gtggtattgtgcattattattttaacgcacaacccggattaatcaggttttctgagtatatacccgttagtactcaatggatacaattgttcaaatgaaagtattgtgttacgagtcgatgatattattaatgataccttcagacgtaaacgcaccaaggccggaaactgccattggtaggttgatttccgatgccgctgtttcaggtgttttgcgacaatgcgatttcactgcagcggaagcctctcaatgttttgttccaattatcaccggaagatcagaatgcattgagacgcgattttctggaagagaaatacagtttcgcaatttttcgtattcctcacaatcattcgctgctgcgcatcgagtgtgtgaagcggattatatttatagtcgattccagacgagaaataccacgatcattgatattggaggaaatttttgcacccatagtaaaatgggtagagataatgttcattcatgttgcccgatattggacgttcgtgatggagctcggtatactgacaggttcatgtctgtggcgggggctttggaaacccagcctgaccgtgagctcagactgaactattgttccaataaatttgaagattgtgatgtttccgcaccatgggcgatggcgattcactcgatttcagatataccgatcacaagtgttgttaagcattgtttccgcagaggggtcaagaaattgatagcctctgtgatgatggatcccatgatgcttgttgcttctcaaggttttatgcccagattgaatgttcaatgggaaattgaacctgatgaggagaacaaaggttcccggcgaatttcttttcatttcgtcgatgctcctggattgtcatatactcataactatgacgtgcttatgcagtacatgacttgtaatcaagtcataatcagtgggaaagccgcgtatcgagttgagcgcgttgcagatctgtctggtgtttttattgttgagattaaccctggcggcaactgctggaatgaaagactggatctagttcccatgcgagatgtttcatgcgcgtggatgacttcgttaaaacgtaagaccttagtgcgggttgccatcccgcaatatattcattcatgggaagttaagtatgtgattgccgacactgattttgttagaagagttgctgaagtgtcgttccgtcagtataaaccagaaacaccattacaggatttggtgaaatctgttgcgacgatgatttcctctgcttctaaccattgcattatcaatggtgtcaccatgcaaactggtacaccgttggccattgaggactatgtcccaatggcggtgacttttgttgccttcgctaaatcaagatatgattcgataaaggaaggcatgaaaatggttaggcagagaggtactaatatcgcggatcctaatgatcattatgattatgagaaagatggatcggatgttaagagtttttcaaatcacataattcccatgaagaataccatcaagtctctgtttttccccatgaaagtgaagatgaatgataattctatgctcatttatagtcaaggaatcttgtcaactgttgttgatgagataaaaacactttttggatgggatgtttgggacactgacgatgcggtaatacagtctctgccctctttttataagatggaggatgtttttcaagttacgtctgaccactattgtttatcacatacattatctgtggattggtggttggagggactgtatgattcttaccatgacatgcgtgttgcgcataaaaagaaacttgatgaagaagaatctcggaagaccaaggtcgagaatgccttattgaaaattgctgaggttttggagaaacctgatgttagcgatggtcttaaagctctttcagaattgcccataatatcatcattattggagaagaagagcgaagaaatcgttacaaaacctcaatgcagggatactgaaaaaccccatattaatccctatgctgatgcaatcaaagaggcgcaggcctattacgaagagcttgaggtcgtaaatactcgcaatttgagaggtgttggtgattacctcttttggcgaaagaagtcgaactatgccagcgtttggggcgctgatgaatcgagagtggttcttgaacctatggcaaggaagttttactctcgagatagaaatgtttccatacccgagtatgagcgaggtatgacggttgatggtttcgtctccattaaatgggtggacggaaacattactgaggacacgtggaagtgtctttccaaatacgcagttgttttgctcgactcttcttgcgtgtttgatgccggttcacgtattatgccaggtctgaaaaaggcattggtaatggatgcaaatttcaaaatcgtgatcgaggatggtgtggcaggatgtgggaaaacaacatctctcctcaagcaagctaagccggattcggatttgttgttagctgccaaccgtgagactgcaaatgacgcaaaagccagcggcgttattcctaaagcgcttgaataccgagtgagaactgtggattcttacttgatgttgagaacgtggttcacagccgagagattgctcgttgatgaatgtttcttggtccatgctggcttggtctatgcagctgccaccttggcacgagtgaaggaagtaatagcttttggtgatacaaagcagattccattcgtgtctcgtataccaactgtcaaactcagacacgcgtctgttgttgggacgttgaagccaagaacaattacctacagatgccctagggacgtgacggcagtccttagtgagaaattttatggtactaaggttaagacgtttaatcttgttaaacagtctttggaattgaaaaacatagattctagtaccgaaatacctgtagaaaaggatacgctatatatagcgcatacccaagctgataaacatgctttgatgcgtttacctgggatgaatggtatagaagtgttaactactcatgaagcccaagggaaaacaagagaccatgtgatacttgtgcgtttaagtaaaactaccaatttattatattccgggaaaatgcccgatgctggtggttcgcacaatcttgttggtctgtcccggcataagaaatctttgagatattttagtgtctttgccgatgatccagacgatcaaattgcgactggaattcgctggtccaaaacattggatgagcaagagttagcagcttatagagctgctggttagtgttttatttataaaacctggttaagggtcctccgggatgtgctcagcacctagcctaagccaagtccatatgcccacctatgctgctccgggtggatgcttatacatgctatggatgcctacatttgaaataatgtagatgcctaatactctctctcagggagagagtttagatgcctccaaaggagatgc

SEQ ID NO: 489 - DNA, 2939 bp, Spinach latent virus
  source 1..2939: mol_type = other DNA
gtattgtgcagtattattttacgcacgacccggattaatcatttttgtgagaatatacccgatagctctcaatggattcttaccacttcttatctcagttgtgtgacttgaatgttctgactcatgcgctttatgttaatcaagtgtttgagattgtggatcagtccacaactagttatatgcagatgtggctttattcccgtgttattgtcccagttttgaaatatcatctcagtggagatattatattggataaattgcacgatgtgttccttggaacctttcgttcaatgatggtgccgatgattatgttgaaccgactttcattcgtcgtgaagatgacgacgatgaaccaccaccggaaagcgtatttgccgcttgaagaaagggaaaaaattcatgctgcgacgtttcttggtcatgatcattgggcaagcgttacttcgggatcatctttttatgatgatctcgaaattctcgctgatgagaccgtgaacgatgatttgcattttgataaagaatcttccatgccagatgagtatcagatcatgtggaatgatggtacaattgattccgtttggtctagtcagtttgaatgcgaagaaccaccgaaaccgaaatttataccacgcccttctgataaggtgtgtgatccagtggttattcaagatgccgtgaacgatatattcccatttcatcatgagatggatgatcgatatttccagacgttagtggagacacaggatatttcccttgaggtttcgaagtgttggatagatgcctccaatttcagagattttgttaagggtccaaattcttatgttgagcctgtgtttcaaaccggtgccactagtaagagagtgcatactcaacgtgaggctcttttagctgtgaagaaaaggaatatgaatataccggaattgcaatccactttcgatcttgatgcggaagtcaacacgtgtttcaaacggtttctcacacacgttgttgatttgccacgattaaaaaggttgcaacctatgactggtgttgaggtggaatacttcaatcaatacttgcttgggaagaatccacctgtgaaggaatatcaaggtcccttgacattgactgcacttgataaatatatgcatatggtcaagacgattgtgaaaccagtcgaggacaattcgttgaagcatgagcgacctttgtgtgccactattacctatcataagaagggtatagtgatgcaggcctcacctcggtttttgagtgctatgtcaagattggtttatgtcttgaaatcaaaaatccatattcccagtggtaagtggcatcaacttttcacgctggatgctggaaaatccgatgccgtaaaatggtttaaagaggtggatttttcaaagtttgacaagtctcagggcgagttacatcacaaagtgcaggagaagatatttaatgctttaaagttacctcccggatttgttgagatgtggttttccgcccatgagcgatcacacattgtggacagagaagcagggattggattttccgttgattatcaacggagaacaggagatgccaatacgtatttgggtaacactttggttactttgatttgtttggctagagtgtatgatttatgcaatcccaatattacctttgtcatcgcttcgggtgatgattctttaattggaagcgtcgaagaattaccgcgcggaccaggagaatttatttacaaccctgttaattttgaagcgaaattccctcataatcaaccatttatatggctcaaagttttagtaagtgttgatcttgaggatggtggaagagaagtgatcgctgttccaaaccctgcgaagttgttaattggtatgggaagacgagactgtcaataccaagctcttgatgatttgtatcaatcatggcttgatgtgatatattattttagagatgctcgcgtgtgtgaaaaagttgctgatttgtgcgcatatagacagacgcgaagaagctctatgtatttattaagcgctctgttgagcttgcctagttgttttgctaataagaagaaatttaagtggctctgttatcgtttaagagagcaagggtgtctgaagaaggatatttatcctgtagcaaaacctataagtgcccataatataaggaaagaagattcaaatggatgcgatgttaatcaaggaacagatgattcgttctcacggaaaaagaatcgtggatgctgggagtatgtcccaaagatgttgcagactgatgtgtctgttcctgttactgataaatctttccacagtaacagaggctcgtcggtttccccaaccgattgcggtgatggagggtgctccagatccgccagctcgattggtagtaaaaataccaaacctcgccatagatttcgagctgcaggagttcaccaacccagcggtcgtgatccagaccgtataccgccgaatcatcgacgaagtgcctaaaggttggtatggtttaaagtcctggtcttcctccaattatggagacgttgtggccggactaaaaagggctgcacgagttaaagtgcatttttctataccgggttcagattgggcttataccttaaatctgtccgaagtggtatctgggttagcactccccaaattaccaattcccgagaaatatctcaggatgccgattgctatcacaatcgatgataccgtcaataaaattggcgatggttttgatgatgtaccatctccatggtacttgtatcaatgatgtgttcctttcatggaacctagtgaggggccctccggggtgtgctcagcacctagcctaagctaagtccatatgcccacctacgctgctccgggtggatgcttatacatgctatggatgcctacatttgaaataatgtagatgcctaatactctctctcagggagagagtttagatgcctccaaaggagatgc

SEQ ID NO: 490 - DNA, 2735 bp, Olive latent virus 2
  source 1..2735: mol_type = other DNA
gatatttcgcactcctagtgaatcttcctagtatatccgttgaaaaaacgagagtgcaacaacaaaaactacagagttctttttttttaaaaaaaaaaaaaaatcaaagagacatggccggagtactttatgatgaggagtacgttccccaggaaccggattacttgtattgcccgtacgagtgggagggtgaagatcctacccaatgcgatgcaaatgttccgtccgtcagctaccttgtggaggctgtaaaaaaatcctttactgagggtaaccacgatatgctgatttcttgcgagtcgtaccacgccgagtgttgcgagggtcccttgatgaacaagggtttgaccctctcgacttactttatgagttatccgggcatttcattacctgcgttcggcggtggtgtgattcatgtcacttcagctcgcgtctgcatgcaagctttttatgccgtgaccccaggaaggtgtagttgttcgtgtggtacgcaattcatctatcgtgccaaaggtggaactggtctaacatttgacgccacgaacactatttctagtgcctttaagttcgaagacgggaaagtgaaatggttaacagaagacctaggcttggcattattggctggttgtttcttgaaatacgtgccaatacctcatgagattgaaattaagatcgaaagaaaggtcgagcccgtgtctgctctggatttttgggaaccagaaggattgatttctgacgtacatttcgtacatccgcaagagagagccttggctcctgagcctccaatggatgtagagatggtgagattagtccgtacggaattgtttgaacactttaatcccacccttcttctgaacgctcggtcggatttttccggtgagaaactgaaagaggttgagttgccacgagctcaatcggaacccttagtccctagggtctgtctcccgcgaggtgatgacgctttaattgatcagtttttcatagacaaggcacccgagcattttaatcgtgaacctgccacagatcaatggcaggtggaatctgatgactttactgtggatttccccacccaagtgcgattacgcgaacgggacgaagattggttcagaaggaaacccgatttcgctgtgtcgtccattcgtacaggtctcgagatgcctcgaattgctacaaagaaggaaatgttaatggcattctcgaagagaaacgttggagctcctcagatggtagaggtacctcaggagatccacgtgaagaggttggctgataggttcttccggacattcttgaaagaaggcggctgggataagggggatggtcattattgggatgattttttccatagaaagggtcgaaaggtcttttcattggagaattgttacgatgaccccttgtcctcatacttagttatgctgaagtccgctgggaaattctctctagatctgaactttccggttcgatcggtaccccaaaccattacttatcatgagaagtgggttaccgaggttttttcccccatgtttctgcaggtgatggcaagatttttctctcgtctgcaagattgggttgttgttccggctggtccgatggctgacttctcccgtgtttggcctagctttgaggggaagtgtttaacagaaattgatctgagtaaatttgataaatctcaaggtaagctgttgcatgatgtgcagagggagattttcctccgtctgggtttcccacccatttggtgtgattggtggtttaaattccacgagtcttcctatttaaatgataagaaccttggtatagctttctcagtagattaccaacgtagaacaggcaatactgccacttactttgggaacacgttggtaacaatgattatgatggccgaagtgtatgaacttgattctctccctttctgtggtttgttttcgggtgatgacaacttgatcgtgactgatcgacctcttgaaggtcgagtttcgttattcccgaacatgttcaacatggaggccaaggtgatgcgtccgggtcagaattacatgtgtagcaaatacctttgcactgtagacggtcgcgtaacccctgtccctgatccttttaagttgctgaagaaagctggtgcctcgtgtcctttggagcaccttgatgacttttacgaatcgtttctggattataccaaatacctggtgagggatgaagttagaacattaatacccaggttgatggcccacaggtatcaagtctcgatggatgaagctggagttgctcttgatcagattatgagctggcgaaagtcaaagactcaattctttaagcatttccagtacaggaaaccaatcaaggactcgctcgaggctgtgaaatccgacttcctttctgctttcggaaaagtagatgatcgaataagagtttggcgcgggcgtcgaaccaatcataagaaggaggtcgatgctttaaaggtcccattggtgagttttagggagtgatggtggctcgcctagagcggtgtgctggtttctacctaaggaaccaggagagtggagtgacttggtcatgacaagtcgagtagtactttaactacgagtcgtcgttgagacgccggtccccttccaaggggatcgagagggttttcccggtactttacccgggattcgaattgagctgtctttgacagagctcaaactcctcgctagatactctaacgagtgtcttgaggactctcctatggagagtcagtaaagacc

SEQ ID NO: 491 - DNA, 7531 bp, Citrus yellow vein clearing virus
  source 1..7531: mol_type = other DNA
gaaaagcaaacattatcatacacaccccaaaaattgtgatcatcgtctctgcatcaacagctcagctaagaaccagagaaatggccactattaggggtgccatcgaacgcattacagacaccaccgtacgcactacacttcaagaggaggcatgccgccaaatacgcgctgaacttaaaaacgtcgaacacatcaaccgttacgctatacagcctgacgccgccgacgcactcgaacacctaggcattggttctaaccccttctctgtggcactgcacacacacggtgcctgcaaagcgattgagaaccaattactctatgtagttggtaccttactcccaaaagaacgtgtcaccatgctcttccttaagaaaagcaagctcaacatcatgaaacgctgccctaaattccaagacatcttcctgaaccaacatattgaaccacgcgacgtttctaggtactgcgactttaacgtccaatccacctccaccagcatacccacacgaacggcttacatcagtgacacactccactttatggaccgtagagacctagtccgactattcctaaacagcccaaatctagagactctctacgccaccattgttctcccagtcgaggctgcttacaaacaaccgagccgctacccagagatataccagattaactatgacttcgacggtttccagtacatacctggaggccatgggggcggcgcctaccaccacgagttcgaacagctgcaatggttagacactggccatatccactggcgtgggcccgactgtaaagagattcgcatgacaattaccgcccaaatgctcgaaagcttaggtgcgaatcatcttttctgcttcaaacgtgggaaactactcaccccacgtgtacgcactttcggccgagatacccaagtgctcttgcccaaaatcttccgcccggccgacaaaaactttaacagggcaataccactaaccctagctaacaaactactcctgtacgctaaatccattaacacagtgaccttccgcgacgtcgttgccaagacacgccaacttatgaaggacaaggagcttgaaacatacaccggcaacgacctgttgcatatggccaactatttcttcgctgttggagcactgtcaggagttaactcctatgaccaattgcttggcctatccgcctgggaagcctgcaccgtccgtatcaagaacaccataacaaatctctgggaaaagattgccggaaagaaagagttcggcaagctattggaggcccttgagtgggaaacattcacatactcacgtcaagtgaccgaattcaccgttacgggactgcccgccctgctccccctcccagacatctcagaccaagaagagattttcgcccagcaggacgagttagacaaaatcactgccggcgctaccaagatacggactattgacattatgcggggacaagctaaccgcgctaacccaaaaactccgatcaactcaacaccggcccagggaccccaactgcccgatacccccgacccaatcgaccaagctgcctccaaagacctcgtcaccaagcttcagaaaaacaaacgcatttacatccaagacgacgggccggaataccttatgggacacatggctgaagtccctgcctggtatcttgaacaagatgataccaccactagactcaaaaaccgctgcgcttggttcttcggcccacccacctacagatatgggcacaacgacattgagtacaccaccatagaatactacccttgggtcgagcgtattggagccattttcggcaagtacaacacctgtcttgctcaaacttacgacgccggagcccgtattggataccacgctgacgacgaagactgctacgaccccgacgtcaccgtggtcaccatcaacctcactgggaacgccaccttcctgctcaagaccccaaccggcactaggacctggaaacttaaacctggtgacttcattatcatgaaacccggtgcccaaaggtgcacaaaacatgccattagagattgcacaactaaccgcacatccttaaccttcagatggcaggcccgcacttgccccactaacctcagaaagatcactaacctacccaaagccaccaaccaaccccaaaccactgaatggcgtcctgtaactaaaccacgccctagcaccaccgcttccagcgacacccagaccccacttgtcatagaccaggaacgagggtataccaccacctccgacgtgacaccaacgattaggctgcccgccgaaaatggtaataacaccggtgctggaccctcctccgcattaaccctcgccgacctgaatgataaccaagcgccgaccactaacaaaggaaaagagaaacttgaggaaatggtcgaaactggcccaactatcatggaacgcttcctcaacaccgttcaggaaccaacacaagatttatgggactccgcctctgaatccgccgcgagctacctcgctgaaggcctcggcatctctgccatccaagcactcccttgggcacctcacttggaactcatcaatgcattaggcttccagggcactgaaaggcaatacggcccagacaactgtctcatatggcctatcacgcattacagagaattgcccagaagcaacaatgtcgaagcccctccggaagtgcttgagctgctcgactgcatcaatagataccccactgacgtcccaatgctcaaaactcgagccgccgccttcggttcagacgtcaagaatctacgcataggggcacttgttaagaaccaggacaaacagtggcgcgcatcactcgcactactttgtgaggaaaatgaacacctcctccctaccactgtaatacacggcgctggtggctccgggaaatcccacttactccaacagtgggtggcgtctactgagcgcggaaatgtagtcaccatcttgcccactatcgaactccttcgagactggcaaaacaaatgtccacatgcaccgaaagagactttcaaaaccttcgagaaagcgctcatccagaacagcgcccccgtggttatcatggacgactactctaaacttcccccagggtatattgaagcctacgtcagcctcaagggccagtgcaaacttctcatactcactggagatcctagacagagccactaccatgaggagaaccctgaggccttaatctctactcttgaccccgccacggactactttggcaaattttgcgcatacaacatcaacgccactcatagaaatgccaaaaccttcgccaatgcgcttggggtgtactctgaaaaagaaatccccaccaccatcacctgctcatcctaccagaaaagcggttggccaacacttgtcccatccatccttaaaagaactgcgctcaacgacatggggcagcgctcactaacctacgcaggctgtcagggactcaccaccccaaaagtgcagatagttcttgacaacgccacaccactatgctctgacaaggtcatgtacaccgcactatctagagcggtggaccaaattcacttcttcaacactggcccaaatcacactgattactgggaaaagatgaacgccacacctttcctcaaaactttcatcgaccacacacgtgaggagaccttcgctgagcaccaacctgccgaacccacagtgcgtgagtacgcaccagcaacgcatttcccaccggctaacgagaacctagcactagagccgtgggtcgaaccgctgactgataaacactcgcgggaactcttccactctgccttaggccacagcaactgcgtccagactgaaaacaccgtagtccaactttttccccaccaacaggccaaagacgaaacgctcttctggaaaacaatagatgccagaatcaagataaccaccccagaagagaacatcagggcttgcagcatagccactgacattggcgacatcttgttcctaaattacaaagaagccatgggtttaccacaagaccccatacccttcgaacaggcactctgggactcttgtcaagccgaggtgcaactaacctacctcagcaagcctctggctgcactcgcaaatgccgcccaaagacaagaccccgactttgactccaacaaaatccaactcttcctgaaatcacaatgggtcaagaaagtcgagaagatgggctgccttaggatcaaacccggccaaactattgcttccttcatgcaacagactgtcatgctatacggaactatggctcggtacatgcgccgcatccgcacctcactttgcccacccgaaattatgatcaactgcgagaccaacccaaaccaaatcggaacatgggtgcgtgagtattggaacttcaacacccagagccatgagaatgactttgaagcgttcgaccaatcccaagacgccaacatgttacaattcgagctcattaaggccaaataccactcaatccccgaggagatcatcgccgggtatcgacacctgaaatgcaacgcccacatcttccttgggactatatcgatcatgaggttgtctggtgaagggccgacctttgacgccaacacagagtgctccattgcatacaaccacacaaggtactttgtgccgaaaggcaccgcccagctctacgccggagacgactctgcatgcgcgtcgcccctctctgaaaaacccagcttccaacatatctcaccagagctcagcctcaagtctaaggccaagattagaacccaacagaaaggagactttgcgaccttctgtggctggctcatcactccaaaaggcctgatcaaaaaccccacccagctttacgcctcctggttattggctaagcacaacaaagatctcgcggacgtggccagaaactatgccttggacttacgcattgcctatcaacttaaagacgagctctatgagttattatcacctgaagaacttgaccaccaccaactgctcgtccgagagatgatcaagcacaaaatgggccatctcctcaacctccctgaggggtttaaaacaaactaactcgaaatggacttacctgagctcctgctatccaaaaacttcattcgcacccggttacccctcgccaaacccattgtcatacacgctgttgccggcgccggcaagacacaacttcttgaagaattcgcgcggtcctcaccctcaaccaaaatctactcacctgtgaaacatcactccaactcactgctgctctcgcccttccacaaagctctctctgaagcttccattgtcgacgagtaccctctaagccagatacacgagaacgtcgagtacatctttgctgaccccatccaataccttggtaatccaaaccttagaaaaccccactacatctgcgcgtcttcccatcgatttggccattccaccgccgctctcctaacaaaacttggcattgaaacttacgcacataaagaagataccgtccgggtagacaatatcttccaggctgaaccagacggccaaatcatcgcctgcgaccgacccactcaagagctggctgccaaacacacactagactacctgaggccctgcgaaagcataggactaactttcccacgaaccacgatcctgatctctcacgaacttactgcagacaccctcaccaaagagatttacatcggtttgacccgccactctaaccaccttctcatactcactccggatgcctctacaacctcctcctgaccacacttgggctttccgactactagctcttggcgccgccttagcactgctcactttcacgctcaaccgagacacaagtcgtcacgtcggagatccttctcactcacttccttttggagggtactacagagacggcagcaaagtagtccattataactccccgagagccacaaaacctagcaccccttccttcctgtacctggccccaatcttactgatcctactaattcatgcagtcaatagatttactaatcctcgccattcttgttcttgcactcattgccagcctattccccgcacctgaaccttgcacaattgtagtctctggcgcctcagcctccgtaactaactgcccaaaccccgaacaacttgcagagctagtcagagcgcttaaaccggctaaaccggtttaaaacttaacacaaactcgaactcatgagcttcgactacactcaccctctctaccgcagctatccatttccacactactgcgagttcgaccggcaccaactctgcgaccatcatccagtactcaaacctccaactcacaaacccagcgccccgaactctctcatgtctaccaacgacaacaagggcaaagaaccacttcacccgacaccttcgggccctaacgacacgaccccgaaacctatccccgtacccactccctcagttacgcccacagctgcaggtaaggaaaaccaagaacccatcgaaaagcgtatcacacacgctttccacgctgaagcaaaaacccacaacaatggggtctctccacctgcctttaacccgaacaacatgaatgctgtgccgctgaacctgctcaacctcaacctaagatactcaccggtcactaactccatagctaaccctaaacagactgaggctatcgggaaagcttgggtccgcatcttgaacatcgatcctgccaacgtgttcttatacgccatcgacctcgccagagcttgcgccgacgcgggctcttcccctgaagctgatattattggagcgaacgaagatctcaaccccgttgttgaacgaaacgcattggccctagtggttagggatttctgcccgctgcgcgctttttgcgcttactactctcgggtggtatggaacctcatgatcaaggcggaccagcctccggccaactggatgaaatccggggtagacgagaacgcgaaattcgcggcattcgacttcttccatggtatcctctcgcccgcttccctgtatgtgcccctagagagacaccctacttccgcggagaggatcgcaaatcaggccatgttcgctgtgaaaattgccaacgctccaggaaatggcacggacctcacgatggaccacgttgccttcaccaaaggaaggactacccagcactccggcctccgcccgacccctttcaacatctaaccacctttgaaccaatactcctagcatgcctacaagcccttaaaccacttccccccgaaatccaaatagctatcatttcgtgtgtgtgtgacttctttaatttcttacgctgtgccagtagcaagtaccagggcaccagccgctcagctgttaaacgtcgagcggcccgcctgaactactgctacaagtgtgggcaccccttatatctaaataaacctcacccctgccgaccaggtcaattgtgctctgcatctatctccgagcgcctctgtttgctccacacaggaccgattaggtttctaaccgaaaatcctgttagtgccagagcagctcacttcctagcgcacgagctccttgaccccagatgaaacataaatattcaggctttcagtttccattttctg

SEQ ID NO: 492 - DNA, 7890 bp, Potato latent virus
  source 1..7890: mol_type = other DNA
tcggataaaccaaaccaacaatatttacacatactcaagttaaacatacactgttcaatcttgcgtacgttattatggctttgacttacagaagtccattggaagatattgttggtgcatttgaaccaagtgttcaaacagctattgcgaacacagctgctaaccactacaagcagcttgaggaagagaagggaatcttatttaattatgcattgccacctgaggccaaacagaggttaataggcgctggcatatatttaagtcccttttccgctgttccacattcgcatcctgtgtgtaaaattttagaaaatcatctgttgtatgtagagcttcctagtagactagataattcttttatgtttgtaggtattaaaaactttaagttggatctgctcaagcgcagacatgcaaatctaagcatgatccaaactatcaatagatatgtttgtagtttagataaaataaggtacggttcaaatttcgtagttagatctagcgctagttatccagagctttgcagacgcaaaggtgagcttgacggagcagtgttgagggaattggtgcctgagttgatgattaaaagcgctaagaatctattcttgcacgatgagcttcattattggacccatcgggatctgattaccttcttggaggtactgaagccagacaaactgttgggcaccttagtttacccacctgaattgctaaagggtgcgaagaaaagtttgaactcttggtgctacacatatagagtggacaaagacaaattgtttttttatccagatggcgtccattctgaaggctacgagcaaccattgagtggcggttacctcctcgaaacaagtaggattaccacacgtgatggtgaagtttattgcgtcgatgttgtgtgcagtaaattcgcgcatcatttgattgcaataacccgtggtgatctgattgtacccacacaacgcagttttgctccctttgaggccataactagtaaaggtttgaataacttggtgaggggcaaggtggaatgtttccccgtatgcgcaagtgtagtgtctaaattgtataggtatttgcgcacactcaaaaaacccgatgagcaatcagcaatggccaaattgagccaacttcaggcaaatcccactggggaagagatacatttcatccagggctttgccaaattggtgataaatacaaacaaaatcgacagtttaatcaactgcgatagtattaaggtgttcatgggcaaattgtttggtccgttgcccaattggcttaccaagagattgaggagcgtgcaagaggtgtctctcgatgaatttgtccattactttgaaccatatgtcgtcaacgtgcccactaagcatgtgaactatggttttgagttcaattacgtaatggaagatttcaggtacgagcagggtgagaatgatctagtggatatgctagacaattttgatggctccacaaagatgagcacaagcctttgcatgatgaccccatacgtcggcttagcaccattgaccacgcgacgcaaattcctatgccatatcgaggagaattccatattcagagtggtgtctaggaacatcttttgtagctacacaaatagttacaaagtggccgtgagcactgagggggtggttcggatacttgagatttatagcaaagtgtctgtggatctactgggagcgtatttgggaaaattgctcaagaaaacagagttcatagagagagtgcgatcaagggttaaggcaattgccataaagcacctcaagtacacttggcaacaggttggtctagcttggttcaccagtggaaggcgtggctacacaaaatacattgattgcagcccatacacgatgaataccttcaaagagcttaaagagagatggggtgtgattgtgcgtgaattgtctaaacagcaggacaacgctgaagctgcgaaaaacatacctgagcaggaaattcaaacgaccagcaaaccaagttgtgtggagaagcgaaattacttctcgaacactttgatgactagctttgctgcgtcaggagtgaaaggcaaggaacaggtgagctccgaaattgccaagggtaggggtgaaaggagcgaattgagggcaactaaattgatgggctcatgcagcaccctcggcaaagtggctcacatagcatcaagaaaaggctccatgggggtattggaatgtgtagcgagggtcatcaaattggatttccaaaccgccttgaagttccttagagtcaagggtgtgtggatgcaggagtatgagagcataggcgagttggaggaggagcagatacagagtcctgcatatgatttttgtgctgcgatcgcaatgaccttcaatgttgaaattgaattgacgttcccaggctcagagcttgtttaccacttcgctgcaagttcaactgtgagttgtatccgcttgagcatttgggaaggcgtagtcacactgatgagggctgaaaatgattgcgttatcactgcatgtgcacaagctttagctagggagcctgaggatgtagtgaaggtgctcaaagatagattggaggagagcatactggaagagatttggaacggcgaaggggtgcctttcgagagaatgtatctcttctttgaagctctggatattcaagcacattgcaatcgcgatggtgcacagctagtgttgaatggcgggggcaagctggcgcgatgtttcgtgattaaagaagatcacatcgagttcgcaggtgagaaaaaggtcagtagagtacttgagctccaggatgctagaacaagtagtaaagcagacccagaattggtcaaggagtttcagaaagccgggactgtggtagaatatgtagcagtgcaatccagagcgcaagtcctggcgaagagtctagtggatgcaaccactggggtgtgcagctcaaccatattcaatgactgtgagagcttggaacgttcctttagattcaccgaaagcgaactagcgcgaaatgtttgttgtgttatcggtacgtttggggctgggaagagtaccctgttcaaggatatgatgaggcagtgcctagggaaaggtgttcactacgcatcacctaggaaggtgttggcgaatgagctcaaagctagtttgggtttggcaaaagggaagcggaatcgaaaagtagggacagagaattggaatgtgcacaccttcgaaagtttcctaaagaaggcgaaaaatgttgcagagggtgagttggtgatcattgatgagatccagttgtacccgcctggctacctggatcttctactttacctcatacctgagttcactagcgtcttcgcggtcggtgatccatgccaaagtgattatgacaacgagaaggataggcatgtcttcttaggggttgagacagatgtctgtaggcttctgagcggccgtgagtacgaatttaatgtactttcccgcagattccacaacttaggctttgaaagcagattgccctgcagattcaaattcccggctggagcagtcaaggaagagtatttgttcgttaattcaatgactgaggctaatgagttggacagcgcctacaaaagtgtgtaccttgtgtcatcccacttggagaagaaaatagtggagtaccagagtgacgttaaaacgccgaatgtgctgacgtttggtgagtcgactggttgcaccttcaagtatggttgcattctcatcacgcaagtgagtagcgcatgtagtgagcgcaggtggatcactgctctatcgagattttctcacaatctctgtttcatcaatgcaactggtgtgcccatagaaaatgtggcgaagagttacaaagacagaagtttgggaaaattcctgtgtggaactgctgttgagggtgatataaaatcaatggcttatgggaccccaatcttcaaagagcagttcatcgccggcgttgggcgcgatgaaggtgtcaaggaggataaagtcaccggtgatccttggttgaaaaccatgttggatttgatgcagctcccagatgttgaggaagcagagatgatgcaggaagagatgcaagaagagtggttcaaaacccatttgccacaagaggaaatagaaggggtcagatgccgctggattcacaaaatgctagctaaagaagcgagggaatgtagaatgggatcgatcgtttcagaccaattcccagatgatcatagcaagcaagaggggaagcaaatcactaatgcagctgagcgttttgaagctatatacccaagacatcgggcaaacgacacagtcacattcattatggctgtgaagaaaaggctgagattttccaggccttctgttgagaaagcgaagctcacgcaggctgaatgttatggaacttacctgctcaaaaacttcttggatgtgatcaagctcaagcccgcacatgatgaggcaatgatgatcagagcgaaggaagattttgagcagaagaaggtgagtaagagtgctgcaaccatagagaatcacagtgggaggtcatgcagagattggtgcatagatatagggcagatcttttcgaaaagtcagatatgcaccaaatgggacaacagaatgcgggtagctaaagcagcacaaacgattgtttgctttcaacatgccgtcttgtgccgctttgctccctacatgaggtacattgaaatgaagctgaaagaagtgctgccggctcggttttacattcatagtggcaaaggtttagatgagctcaactcttgggttaaagaaggtaggtttgagggagtgtgcactgagtccgattatgaggcttttgacgcttcgcaggaccagtacatcgtcgcttttgagttggcactgatgaggtaccttaggcttccaaatgacctgattgaggattacaagtacataaagactcacttgggttccaagctggggaattttgcaatcatgcgcttctctggtgaggccagcacttttctattcaacacaatggcaaacatgctcttcaccttcatgcggtatgagcttcatggcgatgagtacatttgctttgctggtgatgacatgtgttcatcaaagagattgcgaatcaagaaaacacatgaaagctttcttggaaagctgaagttgaaggctaaggtgcaacacactgagaagcccacattttgtggctggaatttatgtgctgatggaatatacaagaagccacagctggtctttgagagaatgtgcattgccaaagagctcaacaacctgcacaactgcatcgataattacgcaatcgaagtggctttcgcttacaaacttggggagctggctgttaacaggatggatgaagaggaattgggggccttttacaattgcgttaggctcataacaaaattcaggcatctgctcaaatccaatgtagtggaggtctttaagcgtaaatagttgttactttagcttaggttagctactatagatttgatatatggatgtgcttgtgaataaagctttagagtttggtttcaaaagattgagttccgtgctgaagagtccgattgtgtttcatagtgtgccgggtgccgggaaaacgaccttgataagagcgctgcttaactcagacagcagattcgagggttggacgctggccgagggagacaagcctaaccttgaaggagtggtaatcaggaaatacgttggtggagaagttggtccctttgctctattggacgaatattgcgtggaaccggaaattgccggtaaactttacgctgtattcggagatccgctgcaggtgaacaacattggtttcctaagagcaagctggattaaagtggaaactcaccgcttcgggaaagccaccgcgcaattgctaaatcaattcggttttgaagtcagttcaagcaaggcggacattttggtcattgctgatatttttgtgggtgaacctgagggaacagtggtgtattttgaagaagaggttgggtgcttactaaagcgacatagcttggaggccgtgcacattgatcttgtgaggggcgatagttttcctgtagttacatttgtcacatcggaaaattgcatgatattggataaggtgcgcagtttcaattgcttaacgagacattctgagaagttgatcatcttgtgcccaaatgccacttactcccccacctgattacaccaaagcaattttggccgcttgtatcggtttgtcattggctttgctcgtcggagtttactctcgtagcaccatacctgccgtgggagacaatttgcattcattgccgcacggcggaacatacctggacggcacaaagcgaatagtttacggcgctccaaataagctgaattctctggagggccaacgaactttatcaggtcaaccttgggccattgttatcgtgctgatagcggtaatcatattgttgagtcgattcaactccacttgcgcacactgcggtagatgtcattgaccgcaatttatttagccattggtctgctagtcttcagcgtgtctgtgtatttaattcagccaaatctgcaggattcgtgctcgatcgtgattactggggaaagtgtgcgaattctcaattgcagggtgactgaggccctacttcgatttgcactggaggcagagcccaagagcgtgaagatcccttaggtttactgggtttgatttgaatatggatcagaaaggaaaacaaagtgagagttcaagtcaagctgtggcccctgttccaaaaccaccgctgccccctccgatcaggggcgaagaggcggttaatgaaggcaatgaggaggcgaagatggagcgacgcctagctctcttgcatcagcgcttgaagggtgagcggaatggcacacgcattaccaatccgagctttgaaataggaaggcccagtctgacgaggcctgatgatatgaggagggatcccgccaacatattcagtaggttgtccatcgatgatctggcgcagatcaagccaacacctgtgtccaacaacatggctaactcggaggaaatggtcaagatcgctgtcgctgtggaagggctgggtgtacccactgaacaagttgcaaatgttgtactgcaggcggtgatttactgtgctagtgcaagtagctccgtgtatctggatccacatggtacaattgagtacacagggggagcagttgttcgtgattctgttgtagccatcatcaaaagggatgccgggttgaggagggtgtgtcggctttttgcgccgttggtctggaatcacatgttggtgcacaactcacctccctctgattgggctgctatgggcttccaatggaatgacagatttgcagccttcgactttttcgactatgttgaaaatgaagctgcgatacagccgttggatgggttgattcggaggcccacaaggtctgaaaagattgcgcacaacacacacaagcgacttgcactagacaaatcgaatagggatgaagtgttcgcaagtttggaaaccgaaatcacaggtgggaaaagaggaccagaaatcagcaggaatttccgaaatgcagccaattagccactatgaagccaagctcctagccgtgtctttagctatgtataagtttacgggacgttgtgagcccgctgttgctttaaatattgttaataaagcttgtaatgttggtatgggcaagagcagcttcgcgcgcaggcgtagggcggctctcctggggcgttgtcatagatgctttagaacttccatggccacacgttgcaatggtgtgacttgttatccgggcattggagctaagccaaaaatcgagatgttcatcaaatacggtgtaagtgagctgaaaccgtaattgagttgtgcataaaacctaattaattttaagtgtgcaactataaaataaataaagttttaaatatttttccttt

SEQ ID NO: 493 - DNA, 6495 bp, Apple stem grooving virus
  source 1..6495: mol_type = other DNA
aaatttaacaggcttaatttccgcgctttacgtcaatggctttcacttacagaaaccccctcgaaattgcaatcaacaaacttcctagtaagcagtctgatcaactgctttccttgaccaccgacgagattgaaaagaccttagaagtgaccaaccgcttcttctctttttcaatcacaccagaagatcaagaattgttgactaagcatggtctaacacttgcacctatagggtttaagtcacactcccatccaatatccaaaatgatagaaaatcatctcctgtatatatgtgttccgagtcttttatcctcctttaagtcagttgcctttttttcacttagggaaaataaagtagacagttttcttaagatgcattcagtcttttcccatggaaaaattaaatctttggggatgtacaatgctataattgatgggaaagataaatataggtatggtgatgtagagttttcatcttttagggatagagtgattggtcttagagatcaatgccttacacgtaacaaatttccaaaagttctgtttcttcacgacgagttgcactttctaagtccatttgacatggctttcctatttgagacaatcccagaaattgatagagttgttgcaaccacagtttttccaatagaacttttattcggggacaaggtctctaaggaacccagggtttatacctacaaggtccatggctcttcattttcattttatccggatggtgttgcctctgagtgttacgaacagaatttggcaaattctaaatggcccttcacctgcagcggcatacaatgggctaacaggaaaattagggtaaccaagctacagagtctcttcgcccatcatgttttctcatttgacagggggagggcttgtaatgaatttaatcatttcgacaaacctagctgtctacttgcggaagaaatgcgccttttgaccaaaaggtttgataaagcagttattaacagaagcacagtctcttccctcagtacatacatggcttgtcttaaaactgcaaatgcggcttcagctgttgccaagctgaggcagttggagaagagggatctttacccagatgagttgaacttcgtctattcctttggagagcatttcaaaaattttgggatgagagatgactttgatgtgtcagttctacaatgggtcaaagacaaattttgccaggtcatgcctcacttcatcgccgccagtttctttgaaccaacagaatttcatttaaacatgcgcaaattgttgaatgatctggctactaaaggaatagaggttcccctttctgtgatcatcctggacaaagtcaacttcatagagaccagatttcatgccaggatgttcgacatagcacaggcaatcggggtgaacctagatttactggggaaaagatttgattatgaggctgagagtgaagagtacttttcagagaacggttacatctttatgccctctaaatcaaatccagagagaaattggattctaaattccggttcgctgaaaattgactattcaagattggtaagagccaggagatttagattgagaagagatttcctagatcccatatctaaaggaaaatcccctagaaaacaactcttcttggagtcaacgggaaacattaaatcaaatcccaatgctgaaaaaaatagcgagagcggcgaaataaagattgaaggcagtgccgaaaatgatcagccacatgaggtatcacatacttcaatggaaaccgaggatggacagggttttgaaggttcaataccagttgatttaatcaattgctttgaaccagaagaaatcaagcttccaaagagaagaaggaaaaatgattgcgtcttcaaggccatctctgcacacttggggattgactctcaagatttgttgaattttttggtaaatgaagacatatcagatgaattacttgattgcattgaagaggacaaaggactgtcacatgaaatgattgaagaagttttgatcacaaagggtctttcaatggtttatacttctgacttcaaagaaatggcagttcttaatagaaagtatggagtgaatggcaagatgtactgcacaattaaaggcaatcactgcgagctgagttccaaagagtgcttcatcagattattgaaagaaggtggtgaagcgcagatgtcaaatgaaaatctaaatgctgattccttgttcgaccttggaagatttgtgcataatagagacagggctgtcaagctagcaaaatcaatggcaagaggcacaacaggcctcctgaatgaattcgacctagaattctgcaagaacatggtgaccctttcggagttgtttcctgaaaacttttcttctgttgtcgggctaaggcttgggtttgcgggttctggtaaaacgcataaggtgcttcaatggattaattacactccaagtgtcaaaagaatgtttataagtccaaggagaatgctggcggatgaagttgaacctcaactcaagggaacggcctgtcaggtgcatacatgggagactgcacttaaaaaaatcgacggaacttttatggaagtttttgttgatgaaataggtttgtacccacctggataccttacactgctacagatgtgtgctttcagaaagattgttaagggacaaagtgaaaatttcttgaaaggcaaactgttggaattgtcaaagacttgcttaaacataagatgttttggtgatccattgcaattaaggtattactcagctgaagacaccaatctattggacaaaacacatgatattgacctcatgatcaagacgatcaagcacaaatatcttttccaagggtacaggttcggtcagtggtttcaagaactggtgaacatgcccactagagtggatgagtcgaaattctcaaggaagttctttgcagacatttcaagtgtaaaaactgaagattacggactcatcctagttgccaagagagaagataaaggtgtcttcgctggaagagttcctgtagcaacagtgagtgaatctcagggaatgaccattagcaaaagggtgttgatatgtttggaccaaaatctttttgccgggggagccaatgcagccattgttgcaataacaagatcaaaggtcggctttgactttatccttaaagggaattcattgaaagaggtacagaggatggcacaaaagacaatttggcagttcatcattgaagggaagtctattccgatggagaggatagtgaacatgaatcctggagccagcttttatgagagtcctttggatgttggaaattcatcaattcaagacaaagcttctaatgacctgttcataatgccttttataaatttggctgaggaagaagttgacccagaggaagttgttggggacgtaattcaacctgttgagtggttcaaatgtcatgtgcctgtcttcgacacagatccgacgcttgcggagatttttgataaggttgcagcaaaagaaaaaagggaattccagtctgtgctgggtctttcaaatcaatttcttgacatggaaaagaatggatgcaaaatagacatcttgccctttgcgcgacaaaatgtttttccacatcatcaagcgtctgatgatgttactttctgggcaggtgttcaaaaaagaattagaaagtcgaactggagaagggagaaatcgaagtttgaggaatttgaaagccaagggaaagaacttcttcaagaattcatctcaatgctaccgtttgaattcaaagtgaatatcaaggagattgaagatggagagaagagctttttagaaaaaagaaagctaaaatctgagaaaatgtgggcaaatcattcggagagatcagacattgactggaaacttgaccacgcctttctcttcatgaaatcacaatattgcacgaaggaagggaagatgttcaccgaagctaaagctggccaaactttggcctgtttccaacatatagtcctatttagatttggacccatgttgagagcaattgaaagtgcctttttgagaagctgtggagactcatactacatacactccgggaaaaacttcttctgcctggatagctttgtgacaaagaatgcaagtgtctttgatggattttcaattgagtcagactacacggcctttgactcatctcaggaccacgtcatattggcctttgaaatggcactgttacaatacctgggcgtgtcaaaggagtttcagctagattaccttagactgaaattaactctcggatgccgtctcggatcactagcaataatgaggttcacaggagaattttgcactttcttattcaacacatttgccaatatgctgtttactcaattgaagtacaagatagacccaaggaggcataggattttatttgctggggacgatatgtgttccttgagctctctcaaaagaaggagaggggagagagcgacaagattgatgaagagcttttccctaactgcagtagaagaggtgagaaaattcccaatgttttgtggatggtacttaagtccatatggtatcattaaatctccaaaattgctgtgggccaggatcaagatgatgagtgagagacagcttttgaaggaatgtgttgataattacctatttgaggcgatatttgcctacagattaggtgagaggctttacacaattttgaaagaagaggattttgaataccattatcttgtcataagattttttgttagaaattcaaaattgttaacagggttgagcaaaagcttgatatttgaaattggggagggcatcgggtccaaatggctatcgtcaacgtcaaccgcttcctcaaggaggtcgaatctacagacctcaaaattgatgctatctcgtcctcagagctttacaaggatgcaacctttttcaaaccagacgtgcttaattgcatcaaaaggtttgaatcaaacgtcaaggtttcctctcgatctggtgacggcctcgtcctgtctgatttcaaactgcttgatgacaccgaaattgattcaatcaggaagaaaagcaacaagtacaaatacttacactatggagtcatcctggttgggatcaaagcaatgttgccaaactttagaggcatggaagggagagtcattgtatatgatggagcctgcctggatccgaaaagaggccacatttgctcgtatcttttcaagtttgagtctgactgttgctactttggtctcaggccagagcactgtttgtctaccacagacgcaaatttggccaaaaggtttagatttcgtgtggactttgattgtccacaatatgaacaggacactgagttgtttgctcttgacattggagttgcatacagatgcgtcaactctgcaaggtttttggaaaccaaaactggcgattcaggatgggcttcacaggcaatcagcggctgtgaagcacttaaattcaatgaggaaatcaagatggccatcctggatcgcagatccccgctgtttctggaagaaggtgcaccaaacgtgcacattgaaaagagattgttcagaggtgacaaggttagaaggtcacgctcaatttccgctaaaagggggccaaactcaagggtgcaagaaaagagaggatttaggtccctctcggctagaattgaaagatttggaaaaaatgagtttggaagacgtgcttcagcaagcgaggcgccaccgggtaggagtatatctatggaagactcacatagacccggcaaaggaacttctgacggttcctccccctgaaggatttaaggaaggtgaaagctttgagggcaaagagctttaccttcttctttgcaaccattactgtaaatacttgttcggtaatattgctgtctttgggtcatctgataagacccagtttcccgctgttggatttgatacacctccggttcattataatttgacaacgaccccaaaggaaggggagactgacgaaggaaggaaggccagagcgggttcgtctggcgaaaaaacaaaaatttggaggatcgatttgtcaaatgttgttcctgaattgaaaacctttgctgccacttccaggcagaactctttgaacgaatgtacgttcagaaagctttgcgagccatttgccgatttggctcgagaatttctacatgaaaggtggtctaagggattggccaccaatatttacaagaaatggcccaaagctttcgaaaaaagtccatgggtggcctttgattttgccactggtctgaaaatgaatcgtctaacacctgatgagaaacaggtgattgatagaatgaccaaaagactttttcgtactgaaggacaaaaaggggttttcgaggcaggttcggaaagtaacctggaactggagggttaggagtcgtgtgaaattccgcaaacttggtcgcggtcttgcaggttgacatgcctgcctttatacttaattaaagggttcccccggttttctgagcatttccgggttagtgtggtttttctagagtctagagtttgtccactct

SEQ ID NO: 494 - DNA, 8747 bp, Citrus leaf blotch virus
  source 1..8747: mol_type = other DNA
gaaaagcaacgaaagcaacctacacaacccaaaattaatatattgcaataactgttatcactcaatataagccatggctttgatgagcaacaaaactgcaattgaatctattttgggtaactttgaaaagaaacacgtcgatgcaatctacaatgccgccgcacaaactatcctctctcactctgaatttaggaataagcattttgcttattcactcaattcttatcaaaagaagatagcctcaaaggtgggtattgaattgtatccaaatggttatttaccacattcccatccattgtcaaaaatttttgagaaccatttgctttttgatgtacttcctggcgtagtaaatactagtagattagttatgtgtagcataaaggagtccaaagttctggtttttaaagggattcgcgacaaatccagaagacaggtttcagacctcaatgccctcaattccttaaataatagtcatacatcattcattaataggttagttgcatccaaagatgtgagtagatatacggaagaagctgatgctttttttcaatccaagaaagggagtccggagctattttcaaggaatttcatcaaaagcttggaaaataaagaggctgttttttttcatgatgaagttcatcactggactaaggcccaaatgttctcatttcttaaaagcacgaaggtcaaaaggttcattttcactgtagtctatccaccagaaattctcaaaaaatttgccaattcccagaacccaaaggtttatgatttcaaagttgataagggtcggctttttttttttccggatggggttaagacagaggcctatgagcagaaattgaatatggagtggctcttttcagcatcacatcttcgcagtggagactgtgtatggactgtaacaagacataagagtatttatgctcatcacctgtttgagatatccattggcgaactagtcacggactcaaaactttttttttccgattataactccattgacatgtctaaaatatttcttgatcgttttcggagttatgaggtattccccatttcgattgagcacctttataaggtctactcttatctgctttgcctcaaaaaacctgacttggagagtggtctagctaaattaaggcaaattattggagatgatgtcgaaatcaaagaattcctcttctttgaacaattttgtaagcgcttaattgaacgccaaacctcttgggggctatttgggcactctttctttgaaaaattaaccgatatggcattgtcatccttgcccaactctatagcccgaatttttcctcaatggaaaaaaaaaaacacatttgagttccttttctcacttgggactcttgttgtggatgtggagagaaaggtgtgttttgaacatgtgcttgaggaatggggatttgaagttgttatcactgatgaaaatgcctatcttgatccactatctatctttgctatcaatgaaaattttaatgaggatagagtggacgatggttatttggaaagaatccgtcttcccttctggaatctgaatgactatgacttgaaaagaaagagggtaaatgcgtataacattctctcttatcgatttgaagaggagcgaaaaattgaatcagcgcaaaaaggtccaaataagatgctccagattgagtggtacgggattaaagaatttaaagttgacccttttatcagcaactccataactgaatttactcttttagaagcattgctgggaaagaggatagatccaaaaaaatactcatattcaaagcaagcctgcactctttccaactatctcacatttttgtgtgctgagggtttggatggattcaatttggaagagcaccttgaacgaaggttgaaagcggccggtcatgacgtttcagatgacgaggaggaagaattgacttcagctgaacaagcggggcctatcaagatattggctgatccacttggttttatgaaagagtgtttggaggagatcccaatcgaaactgaaccatcactggaagaaagagggcagttttccactgattatcattctgagaaatttgaaatcaattacaatgacatttttaatcctcacaattgcatgaacactcacggcgatgaaattcccacaccgtcagatggcaattgttttttttcagcatttactgaaacttttgaagttgaaagacctgacaccttgaggtctgatttctcagactggcttatggaatttaatggggggtcctatgcttcacttgcagaaatgatcagaccgaatggagtttttatggaggcagaactcatatacttgttttgtgtatttagaggagtcacgttgattattcatgatagaactcatgaaaaagagaatgtttatgctgtacaccgcgggtttgaggagggccatatggtacatagaggcaatcattttgtcgggattgaaacttacaatattagtactttaacctcagaccccttacttggtgacatcccatgcggtttttcagaggaaattacaaaattccattttcggcctgatcatttcaactgtgcccagttcagaggaaggaaggcggcttttatcaccaaagttgatgcagattacgggcacaacggtatggtttacccccacaattcatgggtaccttctttagaagagatcattcagatctgtggtcagggagatgatttcaattgtgcattaataaatttctatgaggcaaactcatctcttgggttccatagggataatgaacgggtgtacaatgatgatcctattttgaccgtctgcacattcggtgaaggtagattcaccattgaatttaaggatcaggtaacttcttttctaatgactgctggctctttctttttaatgcctaaagggttccagaagaaggcaagacactctgtctcaaatgaaatgtcgagagtctcgattactttcaggaagcatgttagaaggttgaatgggtcaccgattgccatcagggaagaaaattacaaaaatacatgcctcattaatgccttttcaaaagcaatgaaaaggagcaaacaggcaatcattgcaaaactgaagactgttaatagccctttctggagtagatacctatctgagggtaacggtggctccattgaagattgtcaatcggcctgtgaggcactggatgttactgtcgaccttaatgtaaatggaaaatgtgtggttcttggaaaaggggctttaagaatctcaatggctttaagaaacaaccatttttcagttatcaatgctgcacaactgatggagaggacttttgttagccacttgcttgaaaaaggaaatgtcaatgtgttagaaggatttgacgcaatgctaagtggtgatgtgggcgcagcaggtgttaacaaaattcaatttgcagccaattttgaatttgctagaattttggcaaattcatttctaaatatgacaactggcatctgcctgggcaaggcattggataatggggaaaagtattttctccacattttgaaagatagagtgaaacagattggtatagacgtcacaatggtgtgcggatttgctggatcggggaaaagtcgcaaactgcagtcctggctgcattcaaggaaaaaagggaacttctgtgtggtttccccaagaacaaacttagccgctgactgggcattcaagttagaattagagcccaatgaacagagaaaggtttcaacatttgaaaaattcatcaaaactgataaaagcaaattagatctcatagttattgatgaattgacattgtttccaaatggttacctggatctcctcgtgtatgaattggctgatgtcaataggcattgtcaaatcatccttctgtttgatccattgcaagcaagataccacaacaaaatggatgaatcaatcctgacatttgaacatgacgtggacaggcttattggtggacagaacattgagtacatttacagcacgcatcggatgtccagatacttcaatagattttttgatgtaccttgcttcaatcaggctgatagaacagaggaacaaaggttgtggatatttgatgacgtttactccataccatccatttgctccgaccgtcaggaaccatgtgatgttcttttggttgaatctgaccttgaaaagaaggcattttcacccatcataaatgttatgacatttggtgaatcccagggactcacatttaatcatgtttgtattttgctgtcagagtccagtgcagcttcaaacgaatttagatggatggtggcgctgacgagagcaaggaccaggttttcactctgttcaaccttcttaggtggaattgaagaatttaaagtcaaaaggaaggaaagtctcatcacatccatactccaaggcgagaagatcacattcaacagattaaatctgatgctgaaatgcaatttaattaggagagaaaaagaaaatgggtgcagagatgaggtcgatagggaggaaaggttggagggtgaccctttcctcaaaccatttatcttcttgggacaaagagttgagaaggatgaagatgaggtagaagaagtgaagatcagggaaccaacctgtcaaactcatctgtatataacagagcctaattttggtttgtgctacaatttcgacttcattagggaaaaagaacagcgggaatacagagaggatatgcttgtaactaaccaattctgtgacagttatgataaggttcatataaacggcaaaagagaaacccctggtcccctgcgattcaaagcgatttatccaaagcactcagccgatgatgacatgacgttctggatggccgtcagaaaaaggcttgtatttagagaagaggaggagaattatcaaaggttgtcaagggcgcatttagttgggggtttgctatacaccaacttcaaaaaaaaaatgggcctggaatttacgtttgaccaaggtctactggaggaaagcataaatgcatttgaaaagaaaaagctggaaaaatcatgtggcacaattaaatctcatagcataaggtcggacattgattgggcgctgaatgatgtatttcttttcatgaaaagccagttatgcaccaagtacgaaaaacaatttgttgatgctaaagcgggtcaaactcttgcctgttttcagcacctgattttggtacagttcgctccatggtgtagatacctagaaacccagatcagaaatcagttgcctgaagaaatttacattcactcaaataaaaattttgatgatttgaatgcatgggtcaaaaaatttttccagagggatatctgtgttgagtctgattatgaagcatttgatgcaagccaggatgaatacatattatccttcgagattcatctgatgaaagatgcgcattttccgcagaaaatcattgatgcatacatagaccttaaatgcaaattgggatgcaaattgggccatttttcaataatgagatttacaggggaattttgcaccttcctattcaacacactggccaatatggcattcactatgtgtagatacgaatggaggagaggacaaccaattgcattcgcaggagatgatatgtgtgcattaaacaatttggctgtttgtcatgatttcgatgacctttttgaactcatcagcctaaaagctaaggtggaaaggacagaaaccccaatgttttgtggatggagactaactccatatgggattgtgaaggagcctgaattagtctataatcgctttcaagtggccattgaagagggaaaggtcttggagtgtctggaaaattatgcaatcgaggtttcttatgcctacagtttaagtgagaggctgtatgaagttttgaaaagtgaaaggcaagttcagtatcatcaagctgtggttagatttatagtcacgcacattgacaaactcaaaacaaaagtgagggaccttttcttagaacaatcttccgacgaagatatctgatggcatccctgatcaatgtaagttcacttgtaaatagggtgaagttggatcaaagtataataggtagtgatgaaataaacaaactgtatggttccgatgcaccattggtgttcaaagatgaagttaaaatggttattcctgggaatgctgagggtgaggcaatcaaattgcaagcaaatattctgaccgctgacagattgcagtcaataagaaatgcaaaagtcaatggcaaagaagcggcttatctgcatttgggatttgttccaattgcaattagatctctattaccttctggaaatgaacagatctggggtagatgcgcactggtagatactagcagaactcgagccgaaacagctgttattgatgaatttgaattcaagttcacaaagaaacagccatttgctgcaaaactactaaccatcaacgctgcagtggatattaattgcaaagtgagtgtcggtagcattcaggtgctgctggagctccatggtgttgatctgagggaagaacgttctgtagcagcaatcatcactggcttaacatgcactcccaccaacaaaatggtgttgctgcataagatagagtgcgacacgcccaaatggtctttgtgcaatataatagagcaggttgaggatgaggaagaatccaagaaggcatttgaaaacatgtttaatgcatcttcttccaacttgatcgacttgggtcaagaacagtggctcgacgaaggtaagcgaacacctttgattggcagcttggcaattaaagggtttggacgcaaagtgatgcctgttcgcagacgaaacctcaccacgagaaatctcatgaaggattatgtgtctcatgttaagtcagagacggcttcactgaaaagaagtcaaagtggaagagattggggtaatgatagattgagaaaatatctagaagagcaggctctggagcaggccagatcatcgactgatcatcagttggttaaagcaccaaaatttaaaaccatcgaagtgactggtttggaaactgtgcatgatctaaaagataaaattgacaaggcagagtcttcaactgccagtgacactggaaccaagtgagtataacgtgtgactagtgtaaatagttagtacttatttgaattaatatagatagtgtacatccatgaaaatcaccaatgataatgccgcaactatcaactattggttagccatagttgaaccattcctcacatctgatgaggacagaaattctgatgacatcattcgaaaattcagagctgtagtggccgagcatggagacacagaggaggtggaccctgaggtcttcttcgccattttttccatcttggccacaaagtacggcagagtttattcaaaaaaagttgaagaattgaatgagtcactcaaagctgcaattttggctggggcagaagcagaagatctgagaaacaagttgaaagacatttcccaaagatatgcatcacagcttgagatcacagcagatagagagcagcagcttgaaagtttgaaaaaaaaagggcatgagcaaccactgaccggcagtggatcttctgaaccggtacatgctgaatcagcacacgctccacagttgcatgtggtgaatgatctgcaacaattctacataccattcaatgaatacccaagtctaactcagtcaataggtacttctgacattgcaaatgatgagcacctcaaaagagtgcaacttacgcttaagattacagacacgaaggtcttttcaagaactggatttgaatttgcgataagttgtggatcaagaagtacgtcagacaaggacccatatgatggtataatcaagatcagcggaaaaagtcatatgaggaaagatatagcatatgcaataagaacttcgggaatcactgtgaggcaattctgtgcagcctttgcgaatctatattggaatttcaatttggccagaaatactcctcctgaaaactggaggaagaaggggttcacagagggaacaaagtttgcagcttttgactttttctatgcagtaggtagcaatgcagcaattccaactgaagctgatgggagcgttagactgataaggcctccaacaaatgaagaaaatgaggctaactctgctatgaggtatgctgacatatacgagcaaaattcaaaaacagctggacatgtaacttcaagtccactgtacaatcgtgggagcagttatgagagcaaaaacaaagcaaaactcttagaaatgtagtcccgaattctggcatgggcggatgggtgggccaggactttacactcttaaagtataagtaaggggtaactcagccgcacgggtgaagattgtgcggagcctcatgaatctgaatccaagatgctaaaggggataccgcgatctgaggggtcatgggggttagcctgaagaacagaacactcattaagtatgtggtgacgcaggtcccgacaacccaaaaaggtgagctgaacctgatccaattggagcagtacaggtaaagttatatcctttctataaattgaaaggtagtttggacagatacatgtcattcaattggtgtggaacgttagtccaaatgaaacatttatgcttggatggaaagtcaagcaaacgttgtcaatgtgtacgtgaaattgtcaaataaacctcagcaatttctatgccctctttgtgctgagtattgtagagggtgaaggtgtgttttccattttatacgtcaataaaataaaatatgtattacttaaatacacatagggatgtcttttaagaacttttagac

SEQ ID NO: 495 - DNA, 6812 bp, Apple latent spherical virus
  source 1..6812: mol_type = other DNA
tccgttttagagcttgtgagttgttattacgttttgttgtttgaatctctgttttgttactctgatttccttcacgtttgcaccttacactctctaccgataaacattatcatcttttattttgaattttatttgaaaaatttttatattttcaatgtcaatcactactcctgtagtgattcgctttgggagttttgactcccctgctgcggcacagattgccgatactaaggaggaggaaactcctctctctcgccttgcagctttaaatcgcaaggctcaaattgctgctcgttcaagagtagcagctgctgcggcacagtatgccgaagagcaggagacactagttctcactgctcaatccatgagggatgctctccctttatggatgaggggtcttgttgcccccgctcccaaatccaaacgcgctctcaacgcgaggcgcgccgtaaggcgtgggaagcctctgaggaggctgcctgggttcgtgactacggtcgtgaacccacttcccctctctctgtttgggagggcactcctgagctccttgctatggagcatgcttaccttgccaagcaaggtgataagcgcatctgcgctcatttgcgcagacaggctctgcgggctgcctacaaagcccgatgtcaaaagagggcctttaaggtcttccaggaagaatgtgaattcttccgtctccctgtccacattgtggacaaaatccaaatcccagggcaggctagccccgtgccagagagcgtatctctgggtggcggtgttaaaaccgctacttctaagcgccaagtgaaaactcggcgctctttctcttctttcctcccaaaggaggaattttcctttgtgttgggcccttgcccaacatcttcccctgaggttactccaacctcaaccccttcaaccacccccccttcttctccacgggcatcttcgcccagaacccccttgcctcaggttaaagaggtgaccacacagggtattactctgtgttctcatgggcctgcttgtcaggaacatttttgttttggttttctagatctcaaagatgagtttcatgcttccacttatttaaagtggatgcttggaacccaactacctgggtctattttttgttttgacctccaagtttctagttatctagagcactgtacagatacaatggaggctattgatctgtggtggcatgttatggatcgttatgtgcgtaattacagagctaccaaatatgtcactaaagacaattacttaacaaaggctagcattgctattgatactgctcctaaagagtttatcaataagtgtaaattgttgaccaagcgtgcgaagcatcgaaatttgtcaaagaaagaatcttatcttcttaaaagaaatgaaagagattctaaatattgggatgcttttatagccttacgtactaatactaaagaaggtcaaggacctatagattgggtgaaggctggttatcgtaaatgtaaagaatactatgataacaccttctccaaatttgtaaatcaaattatgcaatcccttaatcctctaactatgatcctaggaccgtttaagtctgctttttgggaatgcgtttcaaatctcaaagataaatgtgttggtatgataaacgatcattggcttgcttttgcagcaggttcaacacttgttttgaccctcatatttctttttgcgatgatttgcatttgtaaagtttttgtatatttactatctactctaggtatagttgggtgtacagttacttttcttgtaacttctttaatagttattttctttttatttaatggttttctcgaacaagctgcagatattcaactttgtgagcttgttggagctgattttttaaattttttgaaccaaaatcaaaacatcgctcctattgctgccacaatggctgatattaaagaggaagctctcagagggcaagggttgcaatggtgttttacagctttgtataaattaatttctagattaattcctggtggagctaaggaagctgccatcatgtttaatagcgtaggtaatatcagtcgaagcgcaagtcatgccaaggatttctttgtaaatatgaaggaaatgactacttcttggattgacgccctctctgatgccctggctcttctaggagatgactctgtgactgctatgcacacattaaagcatctctgtgagaatgatttcttggaatgggctaagagagttgagcgctatgcaggtgatacatatgattctatgattttgaatcctgcagatcgacttaggataattagggaattagttgaccaacaagtgggctttcaaaaagccttctttaaccccagaatagcttcaaaggcacctagattgatgctcactgaatttcagcgcttatcaactatgttgagagattgccacagtgcactttctcgagctgccctctttgatatgcaaagagttcctcccttttggatacatttgtattcagagaatggcggcacaggaaagtccatggcaatgatgcctttgggtaattatttgttagattctattgaggaacctaagacccatagattcgttactaggaatgtagcctctcgatttttgaatggctaccttcaccaaccttgtttcctcatggacgagtttggtgcagctcctaagacggactatatggacgaagtcactatgttggatctcgtttctcctaaccctttaacgttgaacatggcagctcttggtgacaagaatatcatgttcacttcaaaattaattatttcaactgctaatcgtaggctagctcaccctgatgtaaaacttggggctaatttagatggctttctcagaagacgccacattttggctgaggtggtgttggctcaagggaagccatattttcatgaatttattcttttgaaagcgcgaactgagcagaaaatttatttggatcaagcattgcgagaagttgcaagccccatccatttaagtcctgctgaattttatgcagtttgcgctgagcaatttgtaaattttttaaatcaacaagggaatgctctcattgaacagcagggagtttcctatgttagatctgacgatttttcttttctcaaggattatttgcagtataagatgggtcttgattttcaacaatgtgaaatagagagaatagttactgattattctctctctattaaaaatcaaactatctttccagctgagcatgaacatattttctccagatggagggctgaattagaagcattatccttgtctgaactaattaccatgctcgataagcatgttaccgaaacttttgtatatactctaattaaagagaatcactcaaatgtggttatgtctaacctaacaccttacgagtgcttaatttattctttttgtaaagataagtataagaaagaaactgatgcaaccttctcttctcttcctgaagaggaagttaagcagccttggcttgcagaatttctttcatttacggcaaggctatgtctcaatgtgcccaaatgggtcacattggtcctagccttgtgtgctttttgccttgtaggttatgtactaattaaatttgctataggtttgtttacaggtgcttgtacaatttttagtgttttagctttttcctctttgtctgctcagggtcctgaggattctcctggattcgaaaacgctaggaaaactgctggggttaaggtgcatttcgttaaaacatccttccaaccttctgactggaaggggattaacgttaagccctctggatttaattggggggacgttgctgatgacgatgatgctatccctttgtggggtcaagggcctgatcagaatcaaaacgttctcaatcttttgaaacaccaagttgttttaatagcagagcattccaaggttgtatataatgctatagcccttggaaatagaaattttttgtttactaaacacgtttgggatctcatgccaacctgtaattatggtttattcgggtatgcgattgctaaaaataaaatatacattaatcctaatgttagaccagccattcaattaaaaaatagagatttggttgttgtacagttgcctgattctgttcctcccttctcagccttacctaaggatatttttctaagtaacttagctgaagcacctaaggttgctaacgctgctcttgttgtatcagagccattgtacgagaaacgttcagtggctcaactacaacaaaagatttacccttttgagaacctaccccaaattcatagtagagacacttactcttgtgggtctttgggctcaaagcctatgcctgcctgttattcttatacttttgatacttttgcgggcttatgcacttcacctcttatttctatggatggcggcaggtgcgttttactaggtttacatgtagctggagataaaagtaagatggggtatgcacagatagttaccctggaagacttctccgatattaacttttctgagaaggttggacaaggacccgagcaaatgtatataccaactgctcgatctgaatcctttggatcagtctgtcttcttgggaaatggactggccctaagccttattttttagagaatagttctttaactccctctctaattcatgactgtatagatatagacatgacaacggagcctgctattctttctaagaaagatcccagacttcaatacactaacaataaagattttgatccttttctctcaggtatgggaaagtatgctgttgaggctcactcctttgatgaagatgaagaattgtttgaggatgctctagatcgagttttctcagagatacctatgtttacctgtgaagatttatctaatgatcaggtatgcaatggtatagaggacgatgattatgctgaaggattggttatgcagactgctgaaggttaccccttctgcactatgcggcccccaggagtcacaggaaagacgtggctttttgcgggatcaccaggtgattggcacatagtccccaattctcttcttgctaacgaacttaatgtcaaagagttgaaccttagcaagaatatttttgaaccagtgataggtatagattttcccaaggatgagaaagttgattcttctaaagtgtacataaaacaaaaaactcgactttttactatcctacctgttgattataatattttagttaggaaatattttctttcttttgtttcacaacttatggccctccataatgaagttcctacaaaggtaggtattgatccaatttctaatgaatggtctattctttgtcattctcttcactcaaaaggaaccaattggttcaacggagattattccagatttgatggaataacacctcgtaatgtgcttcagggcattgtgaagagaatttcgcgtagatatgctaacaagagttcttttgctataacagatcctacactttctatcaatggtgatcttgctagatcccttttgatggatatgtgtagcactcgatatgggctaactaatggggacctttggtatgtcacttctggtataccttcaggatttcccttaaccgttatagttaattctttagttaattctttctttgtgcactttgcttatatgaagcttcattcttctgaagtgcacaaggctttgtatcctctttattcttttagaacccttgtatcatatgctgtttatggggatgataatctaatttctgtacatgacacaattaaagatacttttaatttagttactatatctaacttattgttggagcatggtgtgactcttaagaatggagccgataaaaatgaggaaattttatctccattctatcctatagagaaggtggattttctcaagagacgattcaccactttacaaggacatattgttgctccacttaacactgttaatataactgagcgcttgcactgggttcgtaagggcctaggtgatgctgatgccacacttgagaactgtaaatcagctctctttgaagctttatttcatggagagctgtattacaatgatcttcgaggcaaaattgaaaaagcttgtaaagtgaagggccttcctttgatagtcccagattaccaagacgctctttctttatttttaactggaggctcatatgctaaggctattcaggctatagcgatgaatctccctgatagaatctctctgtacaaatctgaattctatagtgtacaaatatatcctcaaattttttatgtgaccaatgagagaaatgtcacacttcagaaattgctggagaccactactctccgtaacatttgttatgtttctaggaactacgagtctaggagcagttctaggggtcttttcactcttaagggtgaaggttggactccagctgctttgaaagctcgtcttagtgtgtacaaagctatggccaaacctgtttacttcgtagatgaggctaatgatggtttggctatgttttattgcttagattatgcttttcgtgtttgtggtttaacccggagtcaaattgcaaaaattcttaatgcagtttttggtggtaaccccgaagtctgccaaagaattttccaatttttctctcaagtcgagccaaccaataagtacattcctcccaatcaaaggaggtaatttgtttggtctttcttccttcttttctttctttctttcttttgaactagtttgttctcgtgatccttggatccgttaaggtttcttgctggttcttccttaagatgagaacatgaaccagtctagttctttttgtttgctgtttattttatttcagtgtgtttgaaaagagtcggatagtccaatcc

SEQ ID NO: 496 - DNA, 8170 bp, Soybean latent spherical virus
  source 1..8170: mol_type = other DNA
tttaatatttgcaatgtctttccattgtccaagttctacttgccttggttacactcaatctttctctcgccgtgatatgcgagagcaaggggatcgttgtccccatgctatgtgtggtgctcttctagtgaagaaggtgcccactttatccccacagggtgccagacctgtggtatcaaagaccactgttgtggtccctcctcaagccactgaggaggttttgtattatgggtgtgcccccagacccgcttttcttgaagcggttttggcggccccaaaattaaagatggctccaccagtggtggatgcgatggaagtcgcatacctccgtggtgttgcagccatggaagctgaggagaagaaactcctcaggaaagaaaaggctgcagttgtggcccgtgctaaggcacggcgagctgcaaggaaggcagccaagaagcaagttgccgagatgaaggcaactgtggccctgaaattggccacaaggcaaaaaactgcacgtttgagtgcagctaagagggccatgaaggccaaaagaaaggcagccaaggaggctgccaggttggcgcttgaagagcgccgtgctgcgggtttaacccgcaaatcggccttcaggcgtagcctgaaaaagaaagccactaagatggctggtaggaaggtccctaagacctccacttccacctttcccaaggtggaatctttttcttgttttccttcttctcccctccctgcttttattagggaggaacagccctgggtggctgtgaataccccctgccctcatcctgagggcttcgatttggcggttgatcccgcctttgtggctcctattgtggggccaatcgttagtgtgccatttatggcacctgttgtgaaggcttttaatagccttgtagaaattttggcggctatcaattatgaggccgctgtagatttaagagcctacattttagaaatagcttcttacgaaaatttctttgctttacggagaatttttgttggaaaagctttatcttggatggctcttatcctacctctttatccctatgcgggcatctttgatacttatctcccacttgatatggtggaagataagaattgtgatgcttatttagcctcattacagcagactgcagtgatggtgctggaagtgacccagggaccaatggacgcacattctatctttgatatagtgcgttccgttggttctaaggttgctagcataaaggacaaggtagtgggatgtatagttgagaaatctgctgccctgttggacactgttatagacacagcaaagggcatgttttttggagttcttggcccataccttgcccgcgcacagaagatcggagaggaaattaaaaaattctgggataactgtgtcgagtgggcaacaaaattgtggcaaggagctcatatagcattacaagctcttggcatttatgctgtttgggctatagttgctatggtgcttgtaggagtaatgtatatattagaaacaattttgatttgtttaggtgtaatgagtggtcatggtgtccttgttgttgctttgacaggggcagtcatgacttttttaggttttactgtttttcagatggggcgtgagtatatacattttttgaccgccctacgtcaaatcattttcttagcagttattccccaaggaggattgactcaagttaatatcatggattcgtccgttgatgttactgagccacactccttgttagatactgctatggcaccagttcattttttggaaactgttgccagtggtttaacattcttttcttctacctctgttacagtcttaggtaaattaggaaattctctggagggaattcgcaaaggttttaattgcctacgcgattttacttccgttttgttagaacaatttggaaatgcttttgaatacatttccggtaagagaacgtctttcttccgtgatcttgcgtgtgcagttaaagtagatatcgctcgatggacccaggatgcacgggaaaccattgagtattttgaaatttcaggttcccttgataggtatgagtattatcgtgctcgtgagcttatctatcaaggtcaagatttgatcgacaccgccaacaaagctcgtagttcgcacacaagtgtaaaattcttgcgaactattggcaagttggttgaggaactaaaagaaattcgtgctaagtgtgcacgaagtttaaaattcccaggatggcgtcgacagcctttttgggtatattgttttggtgagagtcaatgtggcaaatctactttggcaaattatttgatgccattgttgatgtctcacatgggttgggatcctcaggatgtttacagcaaggatcccgttgatggttactggtccggatattatcagcagaagggtttaaagataaatgatttatctgctgttaattccaaagatgtagcgcccctcgagcagcagttgataccattgatatccactgaggagaaaatggtgtcttcggctgaaattgaaggaaaaggaatgcagtttgcctctgaaattgtagtttcttcatccaattttaatgatgcaccaactggtgctgaaattttggatgcagatgcttacagacagagacgaaaggttttgatgcgctgcagaagggctgctgagtgggttcataatgctgatggtacgcgcacagagaagcttgatgctgagggcaaaattgtatataagccctatgatccatccaatgctttatcttgtaccgaggtgcaatggattcatcctgtttcatttacagctcttcccggaccctgtgggcagtggcacttagccgagttcaccatacctatggtgaaggaggctatggatgcccactttttgcaagaagaaacaaagatggcatcctggaagtcgagccttggcatgaagagtcaaacagcaaggaaaatgggttcatacttgcaggatatgattaagggtattggtaattttgttacccttaaaggagcaaaagattcagatcctcgttatttgctggtagctgttgatggaaaatgctatgcgttagaccagcaagggaaagccactccttatgaggattgtgatgttgttgaagaaattgagcggctaactttgttgcaataccgctcttatttcgcggacttggtaatggaacatgctgacaatacatattatcaagattcattccattcatcaacagtccgagattttttgttggctctaatgaaagatgggtcaactgttttgtctgtggatagtctgggtagtagtactcaggacattcacaaagaattatgggcagaattgggactttcagaaaagatttttctgagggtttcacaaatagctcgtaatcaattgcgcgatgctccacattttaaggaagacgttgcgcacaattttttggaaactatgaggcatcttagggatgctattgtagatagaaaggaacaaattcttttattttttgcagcagtagctttagtgggcttgtttagttggggttttttgagcctaattaaacaatttgcttgtggttctttaggatttggtgctggcatcgcattgcgtgagcaaattgctcatagtagtgttatgtcttcaggtagtgtgactagtgcctttgttgcacgcaacatgccagttgtatggggcaaagctgctaggtatgccactgcacactcaagcaaagaagaagtgggcgccaattttgattattttgaagatgctagtgctcatttgttagctcgtgttgttggctcatctggtcagtctgagacctgccttttatttggtcatcaggctattgcactttgtgcgcaccagttgagattgtttcctgacaatgacagggtgactatccattatttttcaaaggagaggcgccctgtttgtttttcatttacttggcattatattaatgctattgagtggcctgactgtgaagtaattgtatatagagatgcacagctcacgccactccctgtatatagtgatgataattatttgtgtggggagcaaacattgcccacagttttaacgataactgggctctcaattaagaagaagaaattctttgatgattccacgttgtgcccaagcgaaaaaattctggacggtgaaatgcccatcgtccggagctggaaagataccgcttctctgagaacgcaagtccagacaattttgtccgagactcatagaagagatataaataggtattatacttctagttacccatcagggaaacatgatagtggaggtataataactgcagttataaatgggaagcgtaaagtgataggcatgcactgtgcgggggcgcaaaatgggaaaatttatgttagtaccattggtcttttgcccacccgcaacattaatgatgcacactctgctgccgattattttgttccaagtattggcagggaggaaaaaggattttgcaagattggttggattgcagatccttcaaagagaccacatgctgccactaagactgcattggcaccagttcctaaggaattggctttgccattgccagagggagtgtctgtaaagattccttctattttaagtgcagcagatccacgcctgcgtgatgaggtgaatcctgaatttaaggattatgatcctctacgcgtaggtatggataaatttgccaaccccatggatccgcttgatgatgaagttttacagcgggtctgtgaagatatttatgaaacctggtatgactgtttaccaatactagatgatgagaaggtcttcttgcaaaagacctccttggaggtggcgttgaacggtataccgggtgaggcttgctatgaagccatgaggttggatacatctgagggttatccttttgttttagaaaggaaaccaggggagagcggcaaactcagttatgtacatattgatgagaatggcgttcgttcccttattcctggtacatcggtttttagagattaccatgaattgtcagcaagtatactgacccaagtgcctgtgttgaattgcattgaatgtcctaaagatgagttgctaaaaccatctaaagttttggagaaaccaggcacacggcttttcgatgtactcccctttacacataatattcttttgagggagtattttttaaatttttgtgtttttctccaacaaaatagggtgcatttgccctgttctgttggtgttaatccatattctcgcgagtggacctggctttttgataggttggctgcgaagagtgataaagctttgaattgtgattatagtaaatttgatgggcttatatcacatcaagtctacatgcacatggttgcaaccattaaccgactctttagagatggtgaggaagcaaattgtgcgcgtaagaacttgtttttaatgtttacatcacgcaggagcatctgctatgatcaggtttatatggtcaaaggtggaatgccttctggatgcgcactcactgtaattattaattcaattttgaatgaaattttagtgcgctatgtctatagaataaccgtcccaatgccagccaaaaactattttaataaatacgttgaattggtggtatatggtgatgataatttaattgccatacatgatgatgtggtctctttttttgatgggcccattattaaggaaaaattggcagaggttggggtgaccattacggatggtactgataaatcatcacccaccttgttacgcaaaccgctggagtctcttgattttttgaagaggggctttaggaaaattgaagggggaatgtattcttgccctctggataaagggtccctttactcccggttatattacagtgctggaggtaaagggggcctttttcaacttgatatcctccacgataatgttaaatctttcttggaggaactgacgcatcatgctgatcattatgaagagtttcaaagagtgcgcagtttttatattaagcgtattccttcatggtcagctacgctgcctacctatgctacatgtctgaatatgatggaggggcagcggaattcagcaacaccctggcaaccacataaatttatagaaacgcggccttcaggttgcgaaactaaaatgatggcgggccaggataatcatgctcagaagatatgtgtaactgagcgtataattatatgtggtgaaaaatatacgccaccaatactggagacctcttttgttgtttcaatagacaaccccctttatattggtgaaaggggggagtatgttaaaacagagtttggttcaggtatggggcgactgcctactgatgcctggatcaaagctttctccagtcccaagaagcacccacagctttttgaagcttataagatgggtgctactatatattttagatcctgcatgccctatttaaatgcatggtgtgcagtgtgtaagtttgcattggctcatggaatcgatcagagttctattattgctatgtatgagtcatgcaaaccaagaggggcgggcgacattgctcctcttgtggccgtaaaggcatacactaaatttgtgaacagaccagtgtttaaatttaaagagactgttcataaggaagtgctcgaagcacacaatagtgtgcgagtcgcctaaaatgagggcgcttcctttctttactagtttctttgtaaaagtaaactagtccttgggggcaggtagctccctccagcagcttggcacttgattagctttaatagtgttagctacccttcagcaaggtaggagctgcggtcgtattcgaaccgttcccgtggaactactcggggttggaagcaatggcgtatagacgctggtgtcatagttcttaaatcttatatgacactagagaggagagccatccctcttgaagcatgcaataaacaaggttgcaccatgaaactagccagcacattgaaaaatgtggcttaagggcttaataccttcgggcgttttggtggacctaacgttatgcgtgattgctgatggtactaatgtactcatgttttccattacatgataaaaggtggattcccttttcagctatgggttatggaatgatcaactcatgcaccagagtgtactaggttagtgtacaaccctctttttgctacctttttctttgcatgaataaaggagatagttcctgtgaaattcaggttcattatcatttactgctttaatttacttttatccctcatctgagtgagacagatggtacgggttgttaataaaagtgtttgggatgcactgtctgatccctcgctgctggagcgatctgagtccagccgcatttgctgcttttagatataagcagatggaggactagcactccccttgagaacaaaatcgagtgcggcctagtcgtctaggatttccttagctataggtgatcgtgggctaatgcataccacagaaacatgcttcgtctttgagctaagtgtgaccgtgatggacacttgcctgtgttctttagcacagtgtgatttccttttagtaggtgatgatgaatgtagttttgaaactatcaccgaggtctgggaatataagcgttttggcaaacgatattgccttaatctgtgtacgacacaattgatagtgtactcaagagagtagggtctggcagcctgaatcttggatgaggtcccgagatgaaaacgggggggtaattaaccccagctatcggtacacggagatttccacgtttatgtaaatgtggcgcatttgctgtttttagatataaacagatattgcaggtagaaaacctgtgtggatacctattcttggagaaggagttcgctcggaagagtactatcttgaaacatttcaaaaggaaatttcattttaaggagagtaggtaagccattatacacctgtgaggagggtacaagataaagctactgctaaatttaatgctactggaagtgattcccagggctacatgcggtgccattgtacttatacctgaagggtgagtttggaaactcctacctattgaaatggtgagaagtgtttatttagtaagctcctaatcattatagggtgacgttgttttcgcaattttgttggtctttaatccttttcaaaattgcttttgcattttaatttatgtacgactcggggaaaagaaccactgtgtgtgtgtttggattcccaatgggtagactataccaatgttagtccccc

SEQ ID NO: 497 - DNA, 76 bp, Spinach latent virus
  source 1..76: mol_type = other DNA
gtggtattgtgcattattattttaacgcacaacccggattaatcaggttttctgagtatatacccgttagtactca

SEQ ID NO: 498 - DNA, 71 bp, Spinach latent virus
  source 1..71: mol_type = other DNA
gtattgtgcagtattattttacgcacgacccggattaatcatttttgtgagaatatacccgatagctctca

SEQ ID NO: 499 - DNA, 113 bp, Olive latent virus 2
  source 1..113: mol_type = other DNA
gatatttcgcactcctagtgaatcttcctagtatatccgttgaaaaaacgagagtgcaacaacaaaaactacagagttctttttttttaaaaaaaaaaaaaaatcaaagagac

SEQ ID NO: 500 - DNA, 80 bp, Citrus yellow vein clearing virus
  source 1..80: mol_type = other DNA
gaaaagcaaacattatcatacacaccccaaaaattgtgatcatcgtctctgcatcaacagctcagctaagaaccagagaa

SEQ ID NO: 501 - DNA, 74 bp, Potato latent virus
  source 1..74: mol_type = other DNA
tcggataaaccaaaccaacaatatttacacatactcaagttaaacatacactgttcaatcttgcgtacgttatt

SEQ ID NO: 502 - DNA, 35 bp, Apple stem grooving virus
  source 1..35: mol_type = other DNA
aaatttaacaggcttaatttccgcgctttacgtca

SEQ ID NO: 503 - DNA, 73 bp, Citrus leaf blotch virus
  source 1..73: mol_type = other DNA
gaaaagcaacgaaagcaacctacacaacccaaaattaatatattgcaataactgttatcactcaatataagcc

SEQ ID NO: 504 - DNA, 384 bp, Apple latent spherical virus
  source 1..384: mol_type = other DNA
tccgttttagagcttgtgagttgttattacgttttgttgtttgaatctctgttttgttactctgatttccttcacgtttgcaccttacactctctaccgataaacattatcatcttttattttgaattttatttgaaaaatttttatattttcaatgtcaatcactactcctgtagtgattcgctttgggagttttgactcccctgctgcggcacagattgccgatactaaggaggaggaaactcctctctctcgccttgcagctttaaatcgcaaggctcaaattgctgctcgttcaagagtagcagctgctgcggcacagtatgccgaagagcaggagacactagttctcactgctcaatccatgagggatgctctcccttt

SEQ ID NO: 505 - DNA, 13 bp, Soybean latent spherical virus
  source 1..13: mol_type = other DNA
tttaatatttgca

SEQ ID NO: 506 - DNA, 192 bp, Spinach latent virus
  source 1..192: mol_type = other DNA
tgttttatttataaaacctggttaagggtcctccgggatgtgctcagcacctagcctaagccaagtccatatgcccacctatgctgctccgggtggatgcttatacatgctatggatgcctacatttgaaataatgtagatgcctaatactctctctcagggagagagtttagatgcctccaaaggagatgc

SEQ ID NO: 507 - DNA, 194 bp, Spinach latent virus
  source 1..194: mol_type = other DNA
tgtgttcctttcatggaacctagtgaggggccctccggggtgtgctcagcacctagcctaagctaagtccatatgcccacctacgctgctccgggtggatgcttatacatgctatggatgcctacatttgaaataatgtagatgcctaatactctctctcagggagagagtttagatgcctccaaaggagatgc

SEQ ID NO: 508 - DNA, 258 bp, Olive latent virus 2
  source 1..258: mol_type = other DNA
tggtggctcgcctagagcggtgtgctggtttctacctaaggaaccaggagagtggagtgacttggtcatgacaagtcgagtagtactttaactacgagtcgtcgttgagacgccggtccccttccaaggggatcgagagggttttcccggtactttacccgggattcgaattgagctgtctttgacagagctcaaactcctcgctagatactctaacgagtgtcttgaggactctcctatggagagtcagtaaagacc

SEQ ID NO: 509 - DNA, 36 bp, Citrus yellow vein clearing virus
  source 1..36: mol_type = other DNA
aacataaatattcaggctttcagtttccattttctg

SEQ ID NO: 510 - DNA, 76 bp, Potato latent virus
  source 1..76: mol_type = other DNA
ttgagttgtgcataaaacctaattaattttaagtgtgcaactataaaataaataaagttttaaatatttttccttt

SEQ ID NO: 511 - DNA, 142 bp, Apple stem grooving virus
  source 1..142: mol_type = other DNA
gagtcgtgtgaaattccgcaaacttggtcgcggtcttgcaggttgacatgcctgcctttatacttaattaaagggttcccccggttttctgagcatttccgggttagtgtggtttttctagagtctagagtttgtccactct

SEQ ID NO: 512 - DNA, 541 bp, Citrus leaf blotch virus
  source 1..541: mol_type = other DNA
tcccgaattctggcatgggcggatgggtgggccaggactttacactcttaaagtataagtaaggggtaactcagccgcacgggtgaagattgtgcggagcctcatgaatctgaatccaagatgctaaaggggataccgcgatctgaggggtcatgggggttagcctgaagaacagaacactcattaagtatgtggtgacgcaggtcccgacaacccaaaaaggtgagctgaacctgatccaattggagcagtacaggtaaagttatatcctttctataaattgaaaggtagtttggacagatacatgtcattcaattggtgtggaacgttagtccaaatgaaacatttatgcttggatggaaagtcaagcaaacgttgtcaatgtgtacgtgaaattgtcaaataaacctcagcaatttctatgccctctttgtgctgagtattgtagagggtgaaggtgtgttttccattttatacgtcaataaaataaaatatgtattacttaaatacacatagggatgtcttttaagaacttttagac

SEQ ID NO: 513 - DNA, 191 bp, Apple latent spherical virus
  source 1..191: mol_type = other DNA
taatttgtttggtctttcttccttcttttctttctttctttcttttgaactagtttgttctcgtgatccttggatccgttaaggtttcttgctggttcttccttaagatgagaacatgaaccagtctagttctttttgtttgctgtttattttatttcagtgtgtttgaaaagagtcggatagtccaatcc

SEQ ID NO: 514 - DNA, 1569 bp, Soybean latent spherical virus
  source 1..1569: mol_type = other DNA
aatgagggcgcttcctttctttactagtttctttgtaaaagtaaactagtccttgggggcaggtagctccctccagcagcttggcacttgattagctttaatagtgttagctacccttcagcaaggtaggagctgcggtcgtattcgaaccgttcccgtggaactactcggggttggaagcaatggcgtatagacgctggtgtcatagttcttaaatcttatatgacactagagaggagagccatccctcttgaagcatgcaataaacaaggttgcaccatgaaactagccagcacattgaaaaatgtggcttaagggcttaataccttcgggcgttttggtggacctaacgttatgcgtgattgctgatggtactaatgtactcatgttttccattacatgataaaaggtggattcccttttcagctatgggttatggaatgatcaactcatgcaccagagtgtactaggttagtgtacaaccctctttttgctacctttttctttgcatgaataaaggagatagttcctgtgaaattcaggttcattatcatttactgctttaatttacttttatccctcatctgagtgagacagatggtacgggttgttaataaaagtgtttgggatgcactgtctgatccctcgctgctggagcgatctgagtccagccgcatttgctgcttttagatataagcagatggaggactagcactccccttgagaacaaaatcgagtgcggcctagtcgtctaggatttccttagctataggtgatcgtgggctaatgcataccacagaaacatgcttcgtctttgagctaagtgtgaccgtgatggacacttgcctgtgttctttagcacagtgtgatttccttttagtaggtgatgatgaatgtagttttgaaactatcaccgaggtctgggaatataagcgttttggcaaacgatattgccttaatctgtgtacgacacaattgatagtgtactcaagagagtagggtctggcagcctgaatcttggatgaggtcccgagatgaaaacgggggggtaattaaccccagctatcggtacacggagatttccacgtttatgtaaatgtggcgcatttgctgtttttagatataaacagatattgcaggtagaaaacctgtgtggatacctattcttggagaaggagttcgctcggaagagtactatcttgaaacatttcaaaaggaaatttcattttaaggagagtaggtaagccattatacacctgtgaggagggtacaagataaagctactgctaaatttaatgctactggaagtgattcccagggctacatgcggtgccattgtacttatacctgaagggtgagtttggaaactcctacctattgaaatggtgagaagtgtttatttagtaagctcctaatcattatagggtgacgttgttttcgcaattttgttggtctttaatccttttcaaaattgcttttgcattttaatttatgtacgactcggggaaaagaaccactgtgtgtgtgtttggattcccaatgggtagactataccaatgttagtccccc

SEQ ID NO: 515 - protein, 3582 aa, Citrus tristeza virus
MSKLRGSFWSSAIAVNSDYTISRIWRKLNTIVVLHYFGFVRITKVIRDKSADMPIVPLRKSVFPFSVRAAVTSFVLLGVLLTLRIQGASVAFPLSTHLALFVPALFAGFSRFSLCKPPLTSAAKRSLRQAKRESVSLSSRASSRFSREVPRGTRSRLHRRVVRRADTAPVESPQDKPTRRNSRLGKTSHLPYVGEAALDDILRWIEEVNPHPSMVAIPVPITFGTMPATAWCSHSEAAVLRAALTITRLKLISPLRRNTYGTSIMTYLLPLTVPVRFLPASASIFPSKSKLGVEVPSGRDLHTAFVRSSHASAFFSDAVRASFVPSSAEQFFHFRRQRTHVLAITDPVLCGTVSVLMSDGVNTARLDVVAPAYYAYAESLGARVRFLWESSDVDDAKVRDGQCYVRHVFDVALYFGRRADLSVRRALGMYPTVGALKAYLVREYGRDSLKVPMRGTYTFGSVFHCLSLNLQVDLRSIPNHHLVGGTSAHVLIGQVRVSVPGSIVKPSRSAVRRRNRRMRRDGFLGSSGSSSSAGESTRCSDCSSPRGLPSPSVLKPSLGRIPSIDRRFRFPAGTQLRVSVPRRVDDHVYVSTGSNFDELCHAVLTRMSKGTTLEILLHSIRERKGLLGFAACFRWGSSHVFVKRGNFTARFPISAVRYENQYAAVMMDVGTSWVPKGYVPDVDVVKRRRSRNRRFPLSHRAVDQSVPALQSSPVEVASVSSDKPSSSQKASSPSTSSSSSFNSTRSSDWVNVGFSHRTTNKVREPRYAGHRRIGNFTFPRGTVYNTPVDERAYKRVLRLRDTTACSFLRILLARLSGYRPLSDEFFNKCVTSRFVACIEPVESGLVKVHFRSDVFRASFPFDGQPIHPATALTLEVVVSWDWMVTAFQNPLKDGYCYIRHFAEVSLSMGRIFFRRDVDLGPFPYVFEVQHRLERLYGKAALRYGVRGQYSAPRCFHCCYNDSPRPMASFNGYHKMGGEDNSLIITDTDRLRAVGSAYEKVKRNIPDSLLVRSVEKDLIEFNQTLVDMHRSRPGVVVPFQMSENQQVMLTRAYPEFNINFIHSVHSDHPVAAGSRALENHLVRKHAGTDYSDVGGCPLFHLRAGHSGVHVCRPVYDVKDAHRRVVRHHQLSKVSLDQSDGVKQVGWTVNTNSVCGNILGECYHASEAMVMVQVYDVPLRELCRAMINKKTSVCYMTMVTPGELLDARESFFIKDLDCSVELDPIADRVVYCFNNSAYTHTYSTICECMRTPCLVVDGFLFTIEMVSLRCSVNYYCITKSSVCPRISETKRLRYRRCDSDLIRIKIPRYSSKTRSCLPGCYYLYLDAKFVSRVYEYVVNNCVVVNAKTFEWTWNYIKSCKSRVVISGKIIHRDEPIALEYLDGFSAVMLSAGVKGRQNADVSRRLAAFSGETSIFELVGFAISEKCRDLFLGIQDAVERCVKSYLRNSFNMSFVDLSDPLLTISEYSELDVPIDLPGFGGIVDGNETRLMEDGVKSALLRKAVQAEAQLSLKRGNTSEIVPCDDDDDSNGDDSRVSLDTDWWFVLRGGSSGGLRAGAAPSLFRCLLRKLGGGLCLAKKVLELLVKRVVESFSRLKRKTARLTSFANLLLARLSCGFFDDTVFSAVWEIAINLTRIVDGVVKTKLGCFRNLFRLIPKLYAGCKDVVKDVSNAYRSVVSFSAEVLGKSYSKLCQFCLEIFDIGLIEVSARNLGLETCVSIALAIFDVLITFPLGSVSFPVVCARVFGRLAMEVGSNFLFKKVFGKPETLGEDTFRRTVSMVLRPKAFDKLSVDAKGLVRCSGVIPGVLRIILSSLFSEDDAWVGYSKHEVSSLPIVTFCVKRLSYSLERCKEACVAFIVDSAKKILKSLTSEFNESIQNSDLTSGAKSLYGHVSSILYTSSGVINKAGSAVATVKAVGSDISGRVKRMRPRFSLSRHFDEQTSEYYSASDCSELDESLFSETPGLRGNARCRDLFRIVSRRAVACCEYVTILLKRLASRAGEYSYSYVMDTLVRLYVATDDVVRRCRSFTFDCTDKASNFVTGFLSWRSLRSGAYSATPGLGGGSRGLTSFSHTGGFTRVIGALGNTLSVVFDEEFFRTLLHRLRADVVVLLVEFLKNLPVCLFSIYTFIECRGRIFPLREFLWGFCRFVWDVIEGLSINTYQYLSAVAEKVYRGAFNRRFNEEDERTLRVITEAEGRIEFLRVVLAEMERFRAASNEVSSSRSSDSPSFPPTYGEIEELNDDSSDSALVIGVDNGTGRTIVDGETDSASGSDSDVSIPLDRDFEQIGRLGGNGNVDVVRLGLKFVLKLLRNLFDARSFKVLYGLLLQTLFYGGSVNKFVCRLVFSLGTCLPFELLRFACSARRLLKSLASFVYQTNLFSEVMVEHLFSVSRLLYDSRYFATVFSELERLNFYLDYFLSLPKRYLFPNSRARSCARVPVPVIRTEGVAPVRERSLNDILDSLDSLKVSDLKGKSTFVDDGESDSGSEHSGSSISFGSVNEEVLNAVNGDSVCEKAPLMKHVTALSRLERHPSGRKDIPVSRKTFVRGESSGVKSKVSMCDYLVTLNSSFGTVPDMYPVARDITYKKLTNAMREFYYSQKITLYELHGKLSSYWDELKVAGFDRKLTRMDLDDDVYVVDFNRKLLVGRNGSHPFRNTLKSYCFMFCNDGLVPCPRSQKYDYALISNQTSFVAANSFLRAVDGKDLTFTNEEHSLIVYEAPPGGGKTHSLVNSYADYCVKVSCLVVTANKNSQTEISQRISNELMGRKLAAKYVTDAASRVFTVDSYLMNHLRLTTQLLFIDECFMVHAGAIGAVVEFTSCKAVVFFGDSKQIHYIHRNDLGVSFVADIDAFIQPEHRIYGEVSYRCPWDICEWLSEFYPRHVATANVGSIGKSSVSIEEINGCDDVPYDKAAKYIVYTQAEKNDLQKHLGRLTVGRNKVVPIVNTVHEVQGETYKRVRLVRFKYQEDTPFSSKNHIVVALTRHVDSLVYSVLTSRRYDDTATNIDRAKEIFDKFRSSNHSYGSSSLEWYLEKYPTEYKGSKASSAPISCINEFLNEVVVGSSVVQLGDVSEELSSRPFESGCDNVTVETPPLLTRVTYTNRLAFGVVRSQAIPPRKASLQENLLSYESRNYNFIKTERFVGPSEFGRAMAAAVIERCFKMEEMAKIRCDIISLTEANILKWLDKRTPCQIKAVHGELKLPFSVEEQISNFKLMVKRDAKVKLDDSSLSKHPAAQNIMFHKKFINAIFSPCFDEFKNRVLSSLNDNIVFFTEMTNAGLAEIIRRIIGDDDNLFVGEVDFSKFDKSQDLFIKEYERTLYSEFGFDTELLDVWMEGEYRARATTLDGQLSFSVDGQRRSGGSNTWIGNSLVTLGILSLYYDVSKFDLLLVSGDDSLIYSSEKISNFSSEICLETGFETKFMSPSVPYFCSKFVVQTGNKTCFVPDPYKLLVKLGAPQNKLTDVELFELFTSFKDMTQDFGDQVVLEKLKLLVEAKYGFASGTTMPALCAIHCVRSNFLSFERLFPFIRGWYVVDALKLRQLRKLTNLICERVVYDNRVSYFSYFDNPFTKPDANDDNVDDLGQAGELATG

SEQ ID NO: 516 - protein, 1056 aa, Spinach latent virus
MDTIVQMKVLCYESMILLMIPSDVNAPRPETAIGRLISDAAVSGVLRQCDFTAAEASQCFVPIITGRSECIETRFSGREIQFRNFSYSSQSFAAAHRVCEADYIYSRFQTRNTTIIDIGGNFCTHSKMGRDNVHSCCPILDVRDGARYTDRFMSVAGALETQPDRELRLNYCSNKFEDCDVSAPWAMAIHSISDIPITSVVKHCFRRGVKKLIASVMMDPMMLVASQGFMPRLNVQWEIEPDEENKGSRRISFHFVDAPGLSYTHNYDVLMQYMTCNQVIISGKAAYRVERVADLSGVFIVEINPGGNCWNERLDLVPMRDVSCAWMTSLKRKTLVRVAIPQYIHSWEVKYVIADTDFVRRVAEVSFRQYKPETPLQDLVKSVATMISSASNHCIINGVTMQTGTPLAIEDYVPMAVTFVAFAKSRYDSIKEGMKMVRQRGTNIADPNDHYDYEKDGSDVKSFSNHIIPMKNTIKSLFFPMKVKMNDNSMLIYSQGILSTVVDEIKTLFGWDVWDTDDAVIQSLPSFYKMEDVFQVTSDHYCLSHTLSVDWWLEGLYDSYHDMRVAHKKKLDEEESRKTKVENALLKIAEVLEKPDVSDGLKALSELPIISSLLEKKSEEIVTKPQCRDTEKPHINPYADAIKEAQAYYEELEVVNTRNLRGVGDYLFWRKKSNYASVWGADESRVVLEPMARKFYSRDRNVSIPEYERGMTVDGFVSIKWVDGNITEDTWKCLSKYAVVLLDSSCVFDAGSRIMPGLKKALVMDANFKIVIEDGVAGCGKTTSLLKQAKPDSDLLLAANRETANDAKASGVIPKALEYRVRTVDSYLMLRTWFTAERLLVDECFLVHAGLVYAAATLARVKEVIAFGDTKQIPFVSRIPTVKLRHASVVGTLKPRTITYRCPRDVTAVLSEKFYGTKVKTFNLVKQSLELKNIDSSTEIPVEKDTLYIAHTQADKHALMRLPGMNGIEVLTTHEAQGKTRDHVILVRLSKTTNLLYSGKMPDAGGSHNLVGLSRHKKSLRYFSVFADDPDDQIATGIRWSKTLDEQELAAYRAAG

SEQ ID NO: 517 - protein, 797 aa, Spinach latent virus
MDSYHFLSQLCDLNVLTHALYVNQVFEIVDQSTTSYMQMWLYSRVIVPVLKYHLSGDIILDKLHDVFLGTFRSMMVPMIMLNRLSFVVKMTTMNHHRKAYLPLEEREKIHAATFLGHDHWASVTSGSSFYDDLEILADETVNDDLHFDKESSMPDEYQIMWNDGTIDSVWSSQFECEEPPKPKFIPRPSDKVCDPVVIQDAVNDIFPFHHEMDDRYFQTLVETQDISLEVSKCWIDASNFRDFVKGPNSYVEPVFQTGATSKRVHTQREALLAVKKRNMNIPELQSTFDLDAEVNTCFKRFLTHVVDLPRLKRLQPMTGVEVEYFNQYLLGKNPPVKEYQGPLTLTALDKYMHMVKTIVKPVEDNSLKHERPLCATITYHKKGIVMQASPRFLSAMSRLVYVLKSKIHIPSGKWHQLFTLDAGKSDAVKWFKEVDFSKFDKSQGELHHKVQEKIFNALKLPPGFVEMWFSAHERSHIVDREAGIGFSVDYQRRTGDANTYLGNTLVTLICLARVYDLCNPNITFVIASGDDSLIGSVEELPRGPGEFIYNPVNFEAKFPHNQPFIWLKVLVSVDLEDGGREVIAVPNPAKLLIGMGRRDCQYQALDDLYQSWLDVIYYFRDARVCEKVADLCAYRQTRRSSMYLLSALLSLPSCFANKKKFKWLCYRLREQGCLKKDIYPVAKPISAHNIRKEDSNGCDVNQGTDDSFSRKKNRGCWEYVPKMLQTDVSVPVTDKSFHSNRGSSVSPTDCGDGGCSRSASSIGSKNTKPRHRFRAAGVHQPSGRDPDRIPPNHRRSA

SEQ ID NO: 518 - protein, 787 aa, Olive latent virus 2
MAGVLYDEEYVPQEPDYLYCPYEWEGEDPTQCDANVPSVSYLVEAVKKSFTEGNHDMLISCESYHAECCEGPLMNKGLTLSTYFMSYPGISLPAFGGGVIHVTSARVCMQAFYAVTPGRCSCSCGTQFIYRAKGGTGLTFDATNTISSAFKFEDGKVKWLTEDLGLALLAGCFLKYVPIPHEIEIKIERKVEPVSALDFWEPEGLISDVHFVHPQERALAPEPPMDVEMVRLVRTELFEHFNPTLLLNARSDFSGEKLKEVELPRAQSEPLVPRVCLPRGDDALIDQFFIDKAPEHFNREPATDQWQVESDDFTVDFPTQVRLRERDEDWFRRKPDFAVSSIRTGLEMPRIATKKEMLMAFSKRNVGAPQMVEVPQEIHVKRLADRFFRTFLKEGGWDKGDGHYWDDFFHRKGRKVFSLENCYDDPLSSYLVMLKSAGKFSLDLNFPVRSVPQTITYHEKWVTEVFSPMFLQVMARFFSRLQDWVVVPAGPMADFSRVWPSFEGKCLTEIDLSKFDKSQGKLLHDVQREIFLRLGFPPIWCDWWFKFHESSYLNDKNLGIAFSVDYQRRTGNTATYFGNTLVTMIMMAEVYELDSLPFCGLFSGDDNLIVTDRPLEGRVSLFPNMFNMEAKVMRPGQNYMCSKYLCTVDGRVTPVPDPFKLLKKAGASCPLEHLDDFYESFLDYTKYLVRDEVRTLIPRLMAHRYQVSMDEAGVALDQIMSWRKSKTQFFKHFQYRKPIKDSLEAVKSDFLSAFGKVDDRIRVWRGRRTNHKKEVDALKVPLVSFRE

SEQ ID NO: 519 - protein, 1649 aa, Citrus yellow vein clearing virus
MATIRGAIERITDTTVRTTLQEEACRQIRAELKNVEHINRYAIQPDAADALEHLGIGSNPFSVALHTHGACKAIENQLLYVVGTLLPKERVTMLFLKKSKLNIMKRCPKFQDIFLNQHIEPRDVSRYCDFNVQSTSTSIPTRTAYISDTLHFMDRRDLVRLFLNSPNLETLYATIVLPVEAAYKQPSRYPEIYQINYDFDGFQYIPGGHGGGAYHHEFEQLQWLDTGHIHWRGPDCKEIRMTITAQMLESLGANHLFCFKRGKLLTPRVRTFGRDTQVLLPKIFRPADKNFNRAIPLTLANKLLLYAKSINTVTFRDVVAKTRQLMKDKELETYTGNDLLHMANYFFAVGALSGVNSYDQLLGLSAWEACTVRIKNTITNLWEKIAGKKEFGKLLEALEWETFTYSRQVTEFTVTGLPALLPLPDISDQEEIFAQQDELDKITAGATKIRTIDIMRGQANRANPKTPINSTPAQGPQLPDTPDPIDQAASKDLVTKLQKNKRIYIQDDGPEYLMGHMAEVPAWYLEQDDTTTRLKNRCAWFFGPPTYRYGHNDIEYTTIEYYPWVERIGAIFGKYNTCLAQTYDAGARIGYHADDEDCYDPDVTVVTINLTGNATFLLKTPTGTRTWKLKPGDFIIMKPGAQRCTKHAIRDCTTNRTSLTFRWQARTCPTNLRKITNLPKATNQPQTTEWRPVTKPRPSTTASSDTQTPLVIDQERGYTTTSDVTPTIRLPAENGNNTGAGPSSALTLADLNDNQAPTTNKGKEKLEEMVETGPTIMERFLNTVQEPTQDLWDSASESAASYLAEGLGISAIQALPWAPHLELINALGFQGTERQYGPDNCLIWPITHYRELPRSNNVEAPPEVLELLDCINRYPTDVPMLKTRAAAFGSDVKNLRIGALVKNQDKQWRASLALLCEENEHLLPTTVIHGAGGSGKSHLLQQWVASTERGNVVTILPTIELLRDWQNKCPHAPKETFKTFEKALIQNSAPVVIMDDYSKLPPGYIEAYVSLKGQCKLLILTGDPRQSHYHEENPEALISTLDPATDYFGKFCAYNINATHRNAKTFANALGVYSEKEIPTTITCSSYQKSGWPTLVPSILKRTALNDMGQRSLTYAGCQGLTTPKVQIVLDNATPLCSDKVMYTALSRAVDQIHFFNTGPNHTDYWEKMNATPFLKTFIDHTREETFAEHQPAEPTVREYAPATHFPPANENLALEPWVEPLTDKHSRELFHSALGHSNCVQTENTVVQLFPHQQAKDETLFWKTIDARIKITTPEENIRACSIATDIGDILFLNYKEAMGLPQDPIPFEQALWDSCQAEVQLTYLSKPLAALANAAQRQDPDFDSNKIQLFLKSQWVKKVEKMGCLRIKPGQTIASFMQQTVMLYGTMARYMRRIRTSLCPPEIMINCETNPNQIGTWVREYWNFNTQSHENDFEAFDQSQDANMLQFELIKAKYHSIPEEIIAGYRHLKCNAHIFLGTISIMRLSGEGPTFDANTECSIAYNHTRYFVPKGTAQLYAGDDSACASPLSEKPSFQHISPELSLKSKAKIRTQQKGDFATFCGWLITPKGLIKNPTQLYASWLLAKHNKDLADVARNYALDLRIAYQLKDELYELLSPEELDHHQLLVREMIKHKMGHLLNLPEGFKTN

SEQ ID NO: 520 - protein, 1780 aa, Potato latent virus
MALTYRSPLEDIVGAFEPSVQTAIANTAANHYKQLEEEKGILFNYALPPEAKQRLIGAGIYLSPFSAVPHSHPVCKILENHLLYVELPSRLDNSFMFVGIKNFKLDLLKRRHANLSMIQTINRYVCSLDKIRYGSNFVVRSSASYPELCRRKGELDGAVLRELVPELMIKSAKNLFLHDELHYWTHRDLITFLEVLKPDKLLGTLVYPPELLKGAKKSLNSWCYTYRVDKDKLFFYPDGVHSEGYEQPLSGGYLLETSRITTRDGEVYCVDVVCSKFAHHLIAITRGDLIVPTQRSFAPFEAITSKGLNNLVRGKVECFPVCASVVSKLYRYLRTLKKPDEQSAMAKLSQLQANPTGEEIHFIQGFAKLVINTNKIDSLINCDSIKVFMGKLFGPLPNWLTKRLRSVQEVSLDEFVHYFEPYVVNVPTKHVNYGFEFNYVMEDFRYEQGENDLVDMLDNFDGSTKMSTSLCMMTPYVGLAPLTTRRKFLCHIEENSIFRVVSRNIFCSYTNSYKVAVSTEGVVRILEIYSKVSVDLLGAYLGKLLKKTEFIERVRSRVKAIAIKHLKYTWQQVGLAWFTSGRRGYTKYIDCSPYTMNTFKELKERWGVIVRELSKQQDNAEAAKNIPEQEIQTTSKPSCVEKRNYFSNTLMTSFAASGVKGKEQVSSEIAKGRGERSELRATKLMGSCSTLGKVAHIASRKGSMGVLECVARVIKLDFQTALKFLRVKGVWMQEYESIGELEEEQIQSPAYDFCAAIAMTFNVEIELTFPGSELVYHFAASSTVSCIRLSIWEGVVTLMRAENDCVITACAQALAREPEDVVKVLKDRLEESILEEIWNGEGVPFERMYLFFEALDIQAHCNRDGAQLVLNGGGKLARCFVIKEDHIEFAGEKKVSRVLELQDARTSSKADPELVKEFQKAGTVVEYVAVQSRAQVLAKSLVDATTGVCSSTIFNDCESLERSFRFTESELARNVCCVIGTFGAGKSTLFKDMMRQCLGKGVHYASPRKVLANELKASLGLAKGKRNRKVGTENWNVHTFESFLKKAKNVAEGELVIIDEIQLYPPGYLDLLLYLIPEFTSVFAVGDPCQSDYDNEKDRHVFLGVETDVCRLLSGREYEFNVLSRRFHNLGFESRLPCRFKFPAGAVKEEYLFVNSMTEANELDSAYKSVYLVSSHLEKKIVEYQSDVKTPNVLTFGESTGCTFKYGCILITQVSSACSERRWITALSRFSHNLCFINATGVPIENVAKSYKDRSLGKFLCGTAVEGDIKSMAYGTPIFKEQFIAGVGRDEGVKEDKVTGDPWLKTMLDLMQLPDVEEAEMMQEEMQEEWFKTHLPQEEIEGVRCRWIHKMLAKEARECRMGSIVSDQFPDDHSKQEGKQITNAAERFEAIYPRHRANDTVTFIMAVKKRLRFSRPSVEKAKLTQAECYGTYLLKNFLDVIKLKPAHDEAMMIRAKEDFEQKKVSKSAATIENHSGRSCRDWCIDIGQIFSKSQICTKWDNRMRVAKAAQTIVCFQHAVLCRFAPYMRYIEMKLKEVLPARFYIHSGKGLDELNSWVKEGRFEGVCTESDYEAFDASQDQYIVAFELALMRYLRLPNDLIEDYKYIKTHLGSKLGNFAIMRFSGEASTFLFNTMANMLFTFMRYELHGDEYICFAGDDMCSSKRLRIKKTHESFLGKLKLKAKVQHTEKPTFCGWNLCADGIYKKPQLVFERMCIAKELNNLHNCIDNYAIEVAFAYKLGELAVNRMDEEELGAFYNCVRLITKFRHLLKSNVVEVFKRK

SEQ ID NO: 521 - protein, 2105 aa, Apple stem grooving virus
MAFTYRNPLEIAINKLPSKQSDQLLSLTTDEIEKTLEVTNRFFSFSITPEDQELLTKHGLTLAPIGFKSHSHPISKMIENHLLYICVPSLLSSFKSVAFFSLRENKVDSFLKMHSVFSHGKIKSLGMYNAIIDGKDKYRYGDVEFSSFRDRVIGLRDQCLTRNKFPKVLFLHDELHFLSPFDMAFLFETIPEIDRVVATTVFPIELLFGDKVSKEPRVYTYKVHGSSFSFYPDGVASECYEQNLANSKWPFTCSGIQWANRKIRVTKLQSLFAHHVFSFDRGRACNEFNHFDKPSCLLAEEMRLLTKRFDKAVINRSTVSSLSTYMACLKTANAASAVAKLRQLEKRDLYPDELNFVYSFGEHFKNFGMRDDFDVSVLQWVKDKFCQVMPHFIAASFFEPTEFHLNMRKLLNDLATKGIEVPLSVIILDKVNFIETRFHARMFDIAQAIGVNLDLLGKRFDYEAESEEYFSENGYIFMPSKSNPERNWILNSGSLKIDYSRLVRARRFRLRRDFLDPISKGKSPRKQLFLESTGNIKSNPNAEKNSESGEIKIEGSAENDQPHEVSHTSMETEDGQGFEGSIPVDLINCFEPEEIKLPKRRRKNDCVFKAISAHLGIDSQDLLNFLVNEDISDELLDCIEEDKGLSHEMIEEVLITKGLSMVYTSDFKEMAVLNRKYGVNGKMYCTIKGNHCELSSKECFIRLLKEGGEAQMSNENLNADSLFDLGRFVHNRDRAVKLAKSMARGTTGLLNEFDLEFCKNMVTLSELFPENFSSVVGLRLGFAGSGKTHKVLQWINYTPSVKRMFISPRRMLADEVEPQLKGTACQVHTWETALKKIDGTFMEVFVDEIGLYPPGYLTLLQMCAFRKIVKGQSENFLKGKLLELSKTCLNIRCFGDPLQLRYYSAEDTNLLDKTHDIDLMIKTIKHKYLFQGYRFGQWFQELVNMPTRVDESKFSRKFFADISSVKTEDYGLILVAKREDKGVFAGRVPVATVSESQGMTISKRVLICLDQNLFAGGANAAIVAITRSKVGFDFILKGNSLKEVQRMAQKTIWQFIIEGKSIPMERIVNMNPGASFYESPLDVGNSSIQDKASNDLFIMPFINLAEEEVDPEEVVGDVIQPVEWFKCHVPVFDTDPTLAEIFDKVAAKEKREFQSVLGLSNQFLDMEKNGCKIDILPFARQNVFPHHQASDDVTFWAGVQKRIRKSNWRREKSKFEEFESQGKELLQEFISMLPFEFKVNIKEIEDGEKSFLEKRKLKSEKMWANHSERSDIDWKLDHAFLFMKSQYCTKEGKMFTEAKAGQTLACFQHIVLFRFGPMLRAIESAFLRSCGDSYYIHSGKNFFCLDSFVTKNASVFDGFSIESDYTAFDSSQDHVILAFEMALLQYLGVSKEFQLDYLRLKLTLGCRLGSLAIMRFTGEFCTFLFNTFANMLFTQLKYKIDPRRHRILFAGDDMCSLSSLKRRRGERATRLMKSFSLTAVEEVRKFPMFCGWYLSPYGIIKSPKLLWARIKMMSERQLLKECVDNYLFEAIFAYRLGERLYTILKEEDFEYHYLVIRFFVRNSKLLTGLSKSLIFEIGEGIGSKWLSSTSTASSRRSNLQTSKLMLSRPQSFTRMQPFSNQTCLIASKGLNQTSRFPLDLVTASSCLISNCLMTPKLIQSGRKATSTNTYTMESSWLGSKQCCQTLEAWKGESLYMMEPAWIRKEATFARIFSSLSLTVATLVSGQSTVCLPQTQIWPKGLDFVWTLIVHNMNRTLSCLLLTLELHTDASTLQGFWKPKLAIQDGLHRQSAAVKHLNSMRKSRWPSWIADPRCFWKKVHQTCTLKRDCSEVTRLEGHAQFPLKGGQTQGCKKREDLGPSRLELKDLEKMSLEDVLQQARRHRVGVYLWKTHIDPAKELLTVPPPEGFKEGESFEGKELYLLLCNHYCKYLFGNIAVFGSSDKTQFPAVGFDTPPVHYNLTTTPKEGETDEGRKARAGSSGEKTKIWRIDLSNVVPELKTFAATSRQNSLNECTFRKLCEPFADLAREFLHERWSKGLATNIYKKWPKAFEKSPWVAFDFATGLKMNRLTPDEKQVIDRMTKRLFRTEGQKGVFEAGSESNLELEG

SEQ ID NO: 522 - protein, 1962 aa, Citrus leaf blotch virus
MALMSNKTAIESILGNFEKKHVDAIYNAAAQTILSHSEFRNKHFAYSLNSYQKKIASKVGIELYPNGYLPHSHPLSKIFENHLLFDVLPGVVNTSRLVMCSIKESKVLVFKGIRDKSRRQVSDLNALNSLNNSHTSFINRLVASKDVSRYTEEADAFFQSKKGSPELFSRNFIKSLENKEAVFFHDEVHHWTKAQMFSFLKSTKVKRFIFTVVYPPEILKKFANSQNPKVYDFKVDKGRLFFFPDGVKTEAYEQKLNMEWLFSASHLRSGDCVWTVTRHKSIYAHHLFEISIGELVTDSKLFFSDYNSIDMSKIFLDRFRSYEVFPISIEHLYKVYSYLLCLKKPDLESGLAKLRQIIGDDVEIKEFLFFEQFCKRLIERQTSWGLFGHSFFEKLTDMALSSLPNSIARIFPQWKKKNTFEFLFSLGTLVVDVERKVCFEHVLEEWGFEVVITDENAYLDPLSIFAINENFNEDRVDDGYLERIRLPFWNLNDYDLKRKRVNAYNILSYRFEEERKIESAQKGPNKMLQIEWYGIKEFKVDPFISNSITEFTLLEALLGKRIDPKKYSYSKQACTLSNYLTFLCAEGLDGFNLEEHLERRLKAAGHDVSDDEEEELTSAEQAGPIKILADPLGFMKECLEEIPIETEPSLEERGQFSTDYHSEKFEINYNDIFNPHNCMNTHGDEIPTPSDGNCFFSAFTETFEVERPDTLRSDFSDWLMEFNGGSYASLAEMIRPNGVFMEAELIYLFCVFRGVTLIIHDRTHEKENVYAVHRGFEEGHMVHRGNHFVGIETYNISTLTSDPLLGDIPCGFSEEITKFHFRPDHFNCAQFRGRKAAFITKVDADYGHNGMVYPHNSWVPSLEEIIQICGQGDDFNCALINFYEANSSLGFHRDNERVYNDDPILTVCTFGEGRFTIEFKDQVTSFLMTAGSFFLMPKGFQKKARHSVSNEMSRVSITFRKHVRRLNGSPIAIREENYKNTCLINAFSKAMKRSKQAIIAKLKTVNSPFWSRYLSEGNGGSIEDCQSACEALDVTVDLNVNGKCVVLGKGALRISMALRNNHFSVINAAQLMERTFVSHLLEKGNVNVLEGFDAMLSGDVGAAGVNKIQFAANFEFARILANSFLNMTTGICLGKALDNGEKYFLHILKDRVKQIGIDVTMVCGFAGSGKSRKLQSWLHSRKKGNFCVVSPRTNLAADWAFKLELEPNEQRKVSTFEKFIKTDKSKLDLIVIDELTLFPNGYLDLLVYELADVNRHCQIILLFDPLQARYHNKMDESILTFEHDVDRLIGGQNIEYIYSTHRMSRYFNRFFDVPCFNQADRTEEQRLWIFDDVYSIPSICSDRQEPCDVLLVESDLEKKAFSPIINVMTFGESQGLTFNHVCILLSESSAASNEFRWMVALTRARTRFSLCSTFLGGIEEFKVKRKESLITSILQGEKITFNRLNLMLKCNLIRREKENGCRDEVDREERLEGDPFLKPFIFLGQRVEKDEDEVEEVKIREPTCQTHLYITEPNFGLCYNFDFIREKEQREYREDMLVTNQFCDSYDKVHINGKRETPGPLRFKAIYPKHSADDDMTFWMAVRKRLVFREEEENYQRLSRAHLVGGLLYTNFKKKMGLEFTFDQGLLEESINAFEKKKLEKSCGTIKSHSIRSDIDWALNDVFLFMKSQLCTKYEKQFVDAKAGQTLACFQHLILVQFAPWCRYLETQIRNQLPEEIYIHSNKNFDDLNAWVKKFFQRDICVESDYEAFDASQDEYILSFEIHLMKDAHFPQKIIDAYIDLKCKLGCKLGHFSIMRFTGEFCTFLFNTLANMAFTMCRYEWRRGQPIAFAGDDMCALNNLAVCHDFDDLFELISLKAKVERTETPMFCGWRLTPYGIVKEPELVYNRFQVAIEEGKVLECLENYAIEVSYAYSLSERLYEVLKSERQVQYHQAVVRFIVTHIDKLKTKVRDLFLEQSSDEDI

SEQ ID NO: 523 - protein, 709 aa, Apple latent spherical virus
GPEQMYIPTARSESFGSVCLLGKWTGPKPYFLENSSLTPSLIHDCIDIDMTTEPAILSKKDPRLQYTNNKDFDPFLSGMGKYAVEAHSFDEDEELFEDALDRVFSEIPMFTCEDLSNDQVCNGIEDDDYAEGLVMQTAEGYPFCTMRPPGVTGKTWLFAGSPGDWHIVPNSLLANELNVKELNLSKNIFEPVIGIDFPKDEKVDSSKVYIKQKTRLFTILPVDYNILVRKYFLSFVSQLMALHNEVPTKVGIDPISNEWSILCHSLHSKGTNWFNGDYSRFDGITPRNVLQGIVKRISRRYANKSSFAITDPTLSINGDLARSLLMDMCSTRYGLTNGDLWYVTSGIPSGFPLTVIVNSLVNSFFVHFAYMKLHSSEVHKALYPLYSFRTLVSYAVYGDDNLISVHDTIKDTFNLVTISNLLLEHGVTLKNGADKNEEILSPFYPIEKVDFLKRRFTTLQGHIVAPLNTVNITERLHWVRKGLGDADATLENCKSALFEALFHGELYYNDLRGKIEKACKVKGLPLIVPDYQDALSLFLTGGSYAKAIQAIAMNLPDRISLYKSEFYSVQIYPQIFYVTNERNVTLQKLLETTTLRNICYVSRNYESRSSSRGLFTLKGEGWTPAALKARLSVYKAMAKPVYFVDEANDGLAMFYCLDYAFRVCGLTRSQIAKILNAVFGGNPEVCQRIFQFFSQVEPTNKYIPPNQRR

SEQ ID NO: 524 - protein, 2195 aa, Soybean latent spherical virus
MSFHCPSSTCLGYTQSFSRRDMREQGDRCPHAMCGALLVKKVPTLSPQGARPVVSKTTVVVPPQATEEVLYYGCAPRPAFLEAVLAAPKLKMAPPVVDAMEVAYLRGVAAMEAEEKKLLRKEKAAVVARAKARRAARKAAKKQVAEMKATVALKLATRQKTARLSAAKRAMKAKRKAAKEAARLALEERRAAGLTRKSAFRRSLKKKATKMAGRKVPKTSTSTFPKVESFSCFPSSPLPAFIREEQPWVAVNTPCPHPEGFDLAVDPAFVAPIVGPIVSVPFMAPVVKAFNSLVEILAAINYEAAVDLRAYILEIASYENFFALRRIFVGKALSWMALILPLYPYAGIFDTYLPLDMVEDKNCDAYLASLQQTAVMVLEVTQGPMDAHSIFDIVRSVGSKVASIKDKVVGCIVEKSAALLDTVIDTAKGMFFGVLGPYLARAQKIGEEIKKFWDNCVEWATKLWQGAHIALQALGIYAVWAIVAMVLVGVMYILETILICLGVMSGHGVLVVALTGAVMTFLGFTVFQMGREYIHFLTALRQIIFLAVIPQGGLTQVNIMDSSVDVTEPHSLLDTAMAPVHFLETVASGLTFFSSTSVTVLGKLGNSLEGIRKGFNCLRDFTSVLLEQFGNAFEYISGKRTSFFRDLACAVKVDIARWTQDARETIEYFEISGSLDRYEYYRARELIYQGQDLIDTANKARSSHTSVKFLRTIGKLVEELKEIRAKCARSLKFPGWRRQPFWVYCFGESQCGKSTLANYLMPLLMSHMGWDPQDVYSKDPVDGYWSGYYQQKGLKINDLSAVNSKDVAPLEQQLIPLISTEEKMVSSAEIEGKGMQFASEIVVSSSNFNDAPTGAEILDADAYRQRRKVLMRCRRAAEWVHNADGTRTEKLDAEGKIVYKPYDPSNALSCTEVQWIHPVSFTALPGPCGQWHLAEFTIPMVKEAMDAHFLQEETKMASWKSSLGMKSQTARKMGSYLQDMIKGIGNFVTLKGAKDSDPRYLLVAVDGKCYALDQQGKATPYEDCDVVEEIERLTLLQYRSYFADLVMEHADNTYYQDSFHSSTVRDFLLALMKDGSTVLSVDSLGSSTQDIHKELWAELGLSEKIFLRVSQIARNQLRDAPHFKEDVAHNFLETMRHLRDAIVDRKEQILLFFAAVALVGLFSWGFLSLIKQFACGSLGFGAGIALREQIAHSSVMSSGSVTSAFVARNMPVVWGKAARYATAHSSKEEVGANFDYFEDASAHLLARVVGSSGQSETCLLFGHQAIALCAHQLRLFPDNDRVTIHYFSKERRPVCFSFTWHYINAIEWPDCEVIVYRDAQLTPLPVYSDDNYLCGEQTLPTVLTITGLSIKKKKFFDDSTLCPSEKILDGEMPIVRSWKDTASLRTQVQTILSETHRRDINRYYTSSYPSGKHDSGGIITAVINGKRKVIGMHCAGAQNGKIYVSTIGLLPTRNINDAHSAADYFVPSIGREEKGFCKIGWIADPSKRPHAATKTALAPVPKELALPLPEGVSVKIPSILSAADPRLRDEVNPEFKDYDPLRVGMDKFANPMDPLDDEVLQRVCEDIYETWYDCLPILDDEKVFLQKTSLEVALNGIPGEACYEAMRLDTSEGYPFVLERKPGESGKLSYVHIDENGVRSLIPGTSVFRDYHELSASILTQVPVLNCIECPKDELLKPSKVLEKPGTRLFDVLPFTHNILLREYFLNFCVFLQQNRVHLPCSVGVNPYSREWTWLFDRLAAKSDKALNCDYSKFDGLISHQVYMHMVATINRLFRDGEEANCARKNLFLMFTSRRSICYDQVYMVKGGMPSGCALTVIINSILNEILVRYVYRITVPMPAKNYFNKYVELVVYGDDNLIAIHDDVVSFFDGPIIKEKLAEVGVTITDGTDKSSPTLLRKPLESLDFLKRGFRKIEGGMYSCPLDKGSLYSRLYYSAGGKGGLFQLDILHDNVKSFLEELTHHADHYEEFQRVRSFYIKRIPSWSATLPTYATCLNMMEGQRNSATPWQPHKFIETRPSGCETKMMAGQDNHAQKICVTERIIICGEKYTPPILETSFVVSIDNPLYIGERGEYVKTEFGSGMGRLPTDAWIKAFSSPKKHPQLFEAYKMGATIYFRSCMPYLNAWCAVCKFALAHGIDQSSIIAMYESCKPRGAGDIAPLVAVKAYTKFVNRPVFKFKETVHKEVLEAHNSVRVA

SEQ ID NO: 525 - DNA, 10749 bp, Citrus tristeza virus
  source 1..10749: mol_type = other DNA
atgtcgaaactcagaggaagcttctggtcttcggccatcgctgttaacagcgattacacgatatcgcgcatctggcgcaaacttaacaccatagtagtcctgcactactttggttttgttagaatcaccaaggtgattcgtgacaaatcggctgatatgccgatagtccctttacggaaatctgtatttccgttttctgttcgcgcggctgtcacgagcttcgtgctgctgggcgtcctcttgacgctccgcattcagggtgcctctgtggccttcccgttatcaacgcatctggcgttgttcgtccccgctctgttcgcgggtttttcgaggttttctctgtgcaaacctccgctcacctctgccgctaagaggtccctccgtcaggcaaagcgggaatctgtttccctttctagccgggcctcttctcgcttctctagggaagtccctcgcggcacacgttcaagacttcacagacgtgtggtgagacgagctgacactgccccagttgagagtccccaagacaagcctacccgacgaaacagccgacttggtaagacttctcacctcccttacgtgggggaggcagcgttggatgatatccttcgctggatcgaagaggttaatcctcatccctcgatggtcgctattccagtgcccatcacttttggaaccatgcctgcaacggcttggtgttcccactctgaagccgcagttttgcgtgccgccttgactatcacgcggctgaaactgatttctccactcaggagaaacacgtacggtacgtctataatgacgtatcttctgccactaaccgtccccgtacggtttctccccgcaagtgcgtccatttttcccagtaaatctaaactgggcgttgaggtcccctctggtagggaccttcacactgcgttcgtgagatcttctcacgcgagcgctttcttctctgacgcggttcgcgcttcgtttgttccgtccagcgcggaacaattttttcacttccgtcgtcagcggacgcatgttcttgctattacagacccggtcctgtgtggtacggtgtctgttttaatgtcggacggtgttaacacagcacgtctcgacgttgttgctccggcgtactatgcgtacgctgaatctttgggcgccagagtgcgctttttgtgggagtcgtccgacgtggacgacgctaaagttcgtgacggtcaatgttatgtccgtcatgtgttcgacgtggctctctactttgggagacgcgccgacctttccgtgcgtagagcgctgggtatgtaccccacagtgggtgcactaaaggcttatcttgttcgcgaatacggtcgcgactctcttaaggttcctatgcgtgggacctacacttttggcagtgtgtttcactgcttgtcgctaaatcttcaagtcgacctgcgatctattcctaaccatcatttagttggtgggacgtctgcccacgtcttaattgggcaggttcgagtcagtgttcctggctcgattgttaaaccttcacgttcggccgttcgtaggcgtaatagacgcatgcgacgtgatggttttctcggtagttccggttcttcttcttctgcgggggagtcgactcgctgttcggactgctcttctcctcgcggtttaccttctccttccgttttaaaaccttccctaggtcggatcccgagtatagatcggcggttccggtttcctgcgggtacgcagttgcgcgtctccgtacctaggcgggtcgatgaccatgtttacgtgtcgactggtagcaacttcgatgagttgtgccatgcagttttgacacgtatgtcaaaaggtacaactctagaaatccttttacactcgattcgagagcggaagggactacttggttttgcggcgtgcttccgttgggggtcttcacacgtgtttgtaaagcgtggcaactttactgcccgatttcctatttcggcggtcaggtatgagaatcagtatgccgcggttatgatggatgtggggactagttgggttccgaagggctacgttcccgatgttgatgttgtgaaacgtcggagaagtcgtaatcgtcgttttcctctttcccatcgtgcggtggatcagtcggtccccgcgttacagtcgagtcctgtcgaggttgcttcggtttcgagtgataagccttcatcgtcgcagaaggcttcttcaccttctacttcttcttcttcttcttttaactcgacaaggagttcagactgggtgaatgtcggtttctctcatcgaactactaataaggttcgtgaaccgcgttatgctggtcatcgtaggatcggaaattttactttcccgaggggcacagtgtacaacacgcctgtcgatgagcgcgcctataaacgtgttcttagattgcgagataccacagcctgttcctttctccgtatactgctagctcgtttgtcgggttacagacctttaagtgacgagttctttaacaagtgtgtcacttcccggtttgtcgcgtgcattgaacctgtggaatcaggtctcgttaaggtgcatttccgttctgatgttttccgtgcctctttcccgtttgacggtcaacctatacaccccgccacggctttgacattggaagtggtggtctcttgggattggatggttacggcttttcagaatcccttgaaggatggatattgctacattcgccatttcgccgaagttagtttgagcatggggcgaattttcttcaggagggacgtcgacttgggacctttcccatacgttttcgaagtgcaacaccgtcttgaaaggttgtacgggaaagctgcgttaagatacggtgttaggggtcaatattcagccccgcgctgttttcactgttgctacaacgattcaccgagaccgatggcgtcctttaatgggtaccataagatgggtggtgaagataactccctgataatcacagacaccgacaggttgcgtgctgtggggagtgcctatgaaaaagtgaagagaaacataccagattcgttattggttcggtctgtagaaaaggaccttatagagtttaatcagactctagtcgacatgcatcgatccagaccgggcgttgtcgtacctttccaaatgagtgagaatcagcaagtgatgcttactagggcgtacccggaatttaatattaattttattcattccgtacattccgatcatccggtggcagcaggttctagggcgttggagaatcatctcgttcgtaaacacgctggtaccgattattcggatgtggggggttgtccgctgtttcatttacgtgcgggtcactccggcgttcacgtttgtagaccggtgtacgatgttaaagacgctcatcgtagagtagtccgtcatcaccaacttagtaaggtttcgctagatcagagtgacggtgttaaacaagttggctggaccgtaaacacgaattctgtatgcggtaacattttgggagagtgttatcatgcatcggaggcgatggttatggttcaagtttatgacgtaccgctacgtgagttgtgtagggctatgataaacaagaaaacttccgtgtgttatatgaccatggttacacctggtgagttgttggacgcccgcgagtccttttttattaaggacttggattgttcggttgagttagatcccattgcagacagggttgtttactgtttcaacaattctgcgtatacacacacgtactccactatatgtgagtgtatgcgaactccttgcttggtagtggacgggtttttgtttactatcgaaatggtatcgctcaggtgtagcgttaattactattgtatcaccaagtcgtcggtctgtccgagaattagtgagactaagcggttgcgctaccgtcggtgtgatagcgacttgattagaatcaaaattccccggtactccagtaagactcgtagttgtttacctgggtgttactatttgtacttggacgccaagtttgtaagtcgcgtgtacgagtacgtggtcaataactgcgttgtggtgaacgcgaaaacttttgagtggacttggaattacatcaaatcttgcaagtcgagagtggtgatcagcgggaagattatacaccgagacgaaccaatcgctttagagtacttagatgggttttctgcggttatgctgtccgctggcgtgaagggtaggcaaaacgcggacgtttctagacgcttagccgctttttcgggtgaaacttcgattttcgagttagtggggtttgctatatccgagaagtgccgcgacttgttcttgggtattcaggacgctgtggaaagatgcgtgaagtcgtacctcaggaattcgtttaatatgagtttcgtggacttgtccgaccccttacttacgattagcgaatattcagaattggacgttcctatcgacttaccgggtttcggtggaatagtggacggtaacgaaactagacttatggaagacggtgttaaatcggctttattacgtaaagcggttcaagccgaggctcagttgagtcttaagagaggcaatacttccgaaatcgttccgtgtgatgacgatgacgactcgaacggtgatgattcgcgtgtttcgctcgatacggactggtggttcgtccttcggggtggtagttctggcgggttgcgagctggagccgccccttctttgtttaggtgtttactcaggaaattgggtgggggtttatgtttggcaaagaaagtgttggaactgttagtcaagcgggtggttgaatcgttttctcgtttgaagcggaaaaccgctcgtttaacgtccttcgctaatttgttgcttgcgaggctctcttgcgggtttttcgatgacactgttttttctgcggtctgggaaatagcgatcaacctgaccaggatcgtcgatggagtagtcaagacaaaactggggtgctttcgtaatttatttcgattgattcccaagttatacgctggttgtaaggacgttgtgaaggacgttagtaacgcttacaggtcggttgtctcgttttccgctgaggttttgggtaagagttactctaaactttgtcagttttgcttggaaatatttgacatcgggcttattgaggtttctgctcgtaatttgggactggaaacatgcgtttcaatagcactagctatttttgatgtgttgattacttttcctttggggagcgttagttttcccgtcgtttgcgctagggttttcggtcgtctcgctatggaagtgggatcgaactttttgtttaagaaagttttcggtaaacccgaaactcttggtgaagatactttccgtaggactgtgagtatggttttgaggcccaaagcgtttgacaagctttccgtggatgcgaaaggtttagttaggtgctctggtgttattcctggagtgttaaggataatactatcttccttgttttccgaagatgacgcttgggtgggttatagtaaacatgaagtttcttcccttcctattgttaccttttgtgtgaagagattgtcttattctctggagcggtgtaaggaagcgtgtgtcgcatttattgttgactctgctaagaagattttgaaatctttaacttcagagttcaacgaatccattcaaaactccgacttgaccagtggtgctaagtccttgtacgggcacgtgagctcgatactttacacctctagtggtgtgattaataaagcaggaagcgccgtcgctactgttaaagcggtcgggagtgatatcagtggtcgtgtgaaacgtatgcgaccccgattttctctgtcccgtcactttgacgagcagactagtgagtactactctgctagcgattgttccgaactagatgagtcgttgtttagtgaaacgcctggtcttcgtggaaacgccaggtgtagagatttgtttcgtatcgtgtctagacgcgcggtagcgtgttgtgagtacgtgacaattcttttgaaacggctagcgtcgcgtgccggtgaatactcctactcgtatgtgatggatacgctcgtgagattgtatgtggcgaccgatgatgttgttagacggtgcaggtcctttacgttcgactgtactgataaagcatctaatttcgtcaccgggtttcttagttggcgcagcttacgttctggtgcgtactctgcaactccagggttgggtggtggtagtagaggtttaacgtcgttttctcacaccggtggattcacgcgcgttatcggcgctcttgggaacaccttatcggtggtgtttgatgaggaattcttcagaactttgctgcatcggttgagggcagatgttgtggttttactggtggagttcttgaaaaaccttcccgtttgtttgttttcaatatacacttttattgaatgtcggggtaggatctttcctttaagagagttcctatggggtttttgtcgtttcgtttgggatgttatcgaggggttgtccatcaatacttatcaatacctctctgctgtcgctgagaaagtgtatcgaggtgcctttaatcgtcgatttaacgaagaggatgagaggacgcttcgagtgatcacggaagcagagggaagaatcgaatttttgcgagttgttctcgcggaaatggaaaggttccgtgctgcgtcgaacgaggtttcttcgtcgaggtcgtctgatagtccttcattcccacctacttacggtgaaattgaggagttaaatgatgattcctccgatagtgcgctagtgataggcgtcgacaacggtaccggccgcactatcgttgacggtgagaccgattctgcgtccggtagcgatagtgacgtttctatcccgttggatcgcgattttgaacaaatcgggcgtcttggcggaaacggtaacgtcgatgtcgttcggctgggtttgaaattcgttctgaagttgttacgcaacctattcgatgctagaagttttaaagtgttgtatgggttgttacttcaaacccttttttatggtggttcggtaaataaatttgtgtgtcgtctggtctttagtcttgggacttgcttacctttcgagttactccgatttgcgtgttcagcgaggcggttgttgaagagtttggcatcatttgtttaccagactaaccttttcagcgaagttatggtggagcatttgtttagcgtttcccgactgctttatgattcccggtacttcgcgactgtgttttcggaattggagagacttaacttctatttagactatttcctttcgctcccgaagagatatctattccctaattctagggctcgtagttgtgctagggttccggttcccgtgattaggaccgaaggagtggcaccagtccgtgagagatcactaaatgacatactggactctttagactctttaaaggtgtcggacctcaaagggaagtcgacgttcgttgatgatggggagtcggattccggtagtgaacattcgggtagttcgatttcgttcggttccgtcaacgaagaagttttaaatgcggtaaatggtgacagcgtttgcgaaaaagccccgttgatgaagcatgttaccgcacttagcaggttggaacgccaccctagtggtcgtaaagacattcctgtttctaggaaaacttttgtgcgtggtgaatcttcgggtgtgaaatcgaaggtgagtatgtgcgattacttggtgaccttgaattcttcgtttggcacagtgcctgacatgtaccctgttgcgcgtgacataacgtataagaaactgactaacgccatgcgcgaattctattactcgcaaaaaataaccttgtacgaacttcacgggaagttgagttcctattgggacgagttgaaggtcgcaggtttcgatagaaagttaacgagaatggatttggacgatgatgtctatgttgttgactttaatcggaaattgttggtggggagaaacggatctcatccgtttcgtaatacgttaaagtcctattgttttatgttttgtaacgatgggttggttccttgcccgcgttctcagaaatatgattatgctttgatttctaatcaaacgtcttttgttgccgcgaattcgttcttacgtgccgtggatggtaaggatttgacttttaccaatgaggaacatagccttatcgtttatgaagctcctcccggtggtggtaagactcattctttggtgaattcgtacgcggattattgcgttaaagtatcttgtttagtagtgaccgctaacaagaattctcaaaccgagatatctcagcgcatatctaatgaattgatgggcaggaagctagctgctaagtatgttaccgatgcagcttccagagtgttcactgtagattcttacttaatgaatcacttgcgacttacgactcaactgctgtttatcgacgagtgcttcatggttcatgctggggcaattggagccgtggttgagttcacgtcttgtaaagcggtggttttctttggtgatagtaagcaaatccattacattcaccgaaacgatctcggggtttcctttgttgcagatattgatgcgtttattcaaccggaacatcgtatttacggcgaagtgtcctataggtgtccttgggacatttgcgagtggctttccgagttttacccgcgacacgtagctactgctaatgtagggagtattgggaagtcgagtgtgtcaatagaggaaatcaatgggtgcgatgacgtaccttacgacaaggcggcgaagtacattgtgtacactcaggctgaaaagaacgatttgcaaaaacacctcggtcgcttaaccgtgggtcggaacaaggtagtaccaattgtaaataccgttcatgaggtacaaggagagacctataaaagggtacgtctggtgaggtttaagtatcaggaggataccccgttctcttcaaagaatcatattgtggttgctttgactagacatgttgattctttggtttattccgtacttactagtaggaggtacgacgatactgcgactaacatagatagggcgaaggaaatttttgacaaatttcgttcgtcgaatcactcgtacggttcgtcatcgttagagtggtaccttgaaaagtatcctaccgaatataagggtagtaaagcatcctctgctccgataagttgcattaacgaatttcttaatgaggtcgtcgttggttcttctgtcgtgcagttgggtgatgtgtctgaagaactaagttcacgtccctttgaatcgggttgtgataatgttactgtagagacaccgcccctcctgactcgggtaacttacacgaaccggctcgcgttcggcgtagtaaggtcacaagcaattcctccaagaaaagcgtcactgcaagaaaaccttctgtcgtacgaaagtcgtaattataactttatcaagacggaacggtttgttggaccaagcgaatttggtagggcgatggctgctgctgttatcgaacgttgtttcaaaatggaagagatggctaagataaggtgtgatattatatcccttactgaagctaacattttaaaatggctcgataagcgcactccctgtcaaataaaggccgtacacggggagttgaaacttcccttttcggtggaggagcaaatttccaacttcaaactgatggttaaacgtgatgctaaggtaaaacttgacgattcaagtctatctaaacatcccgctgctcagaacatcatgtttcataagaagtttatcaatgccatattttccccgtgtttcgacgagttcaaaaatagagtgttgtcctcgcttaatgacaatatcgtgttctttactgagatgacgaacgctgggttagcggaaattatcagaagaatcattggtgacgacgacaacttatttgttggggaagtggatttcagtaagttcgataagtctcaggatttgttcattaaagagtacgaacgtacgttgtattccgagtttgggttcgataccgaacttctcgatgtgtggatggaaggtgagtatcgcgctagagccaccacgctggacggtcagctgagtttttcagttgatggtcagcgtcgttctggaggttcaaacacttggattgggaattccttggttactctaggtatcctttcgttatattacgacgtttcgaagtttgacttactcctcgtttctggagacgattctttaatttattcgagtgaaaagataagcaacttttcttccgaaatttgcttagaaacaggttttgagactaagtttatgtctccgagcgtgccatatttttgctcaaagtttgtggttcagaccggtaacaaaacgtgttttgtgcctgacccttataaattattagtaaagttgggggctccacaaaataagttaaccgatgtcgagttatttgagttgttcacttcttttaaggacatgacgcaggactttggtgatcaagtggttttggagaagctgaagttgctagtcgaagctaagtacggtttcgctagtgggaccactatgccagcattgtgcgctattcattgtgtgcgatcgaactttctgtcctttgagaggttatttcctttcattaggggttggtatgttgttgacgctctaaaactcagacagcttaggaaactcactaatttgatctgtgaacgtgtagtttacgacaatcgggtgagttatttttcgtacttcgataacccgttcactaaacctgacgctaacgacgataacgtggacgacctcggacaagcgggtgaattagcaaccggctga

SEQ ID NO: 526 - DNA, 3171 bp, Spinach latent virus
  source 1..3171: mol_type = other DNA
atggatacaattgttcaaatgaaagtattgtgttacgagtcgatgatattattaatgataccttcagacgtaaacgcaccaaggccggaaactgccattggtaggttgatttccgatgccgctgtttcaggtgttttgcgacaatgcgatttcactgcagcggaagcctctcaatgttttgttccaattatcaccggaagatcagaatgcattgagacgcgattttctggaagagaaatacagtttcgcaatttttcgtattcctcacaatcattcgctgctgcgcatcgagtgtgtgaagcggattatatttatagtcgattccagacgagaaataccacgatcattgatattggaggaaatttttgcacccatagtaaaatgggtagagataatgttcattcatgttgcccgatattggacgttcgtgatggagctcggtatactgacaggttcatgtctgtggcgggggctttggaaacccagcctgaccgtgagctcagactgaactattgttccaataaatttgaagattgtgatgtttccgcaccatgggcgatggcgattcactcgatttcagatataccgatcacaagtgttgttaagcattgtttccgcagaggggtcaagaaattgatagcctctgtgatgatggatcccatgatgcttgttgcttctcaaggttttatgcccagattgaatgttcaatgggaaattgaacctgatgaggagaacaaaggttcccggcgaatttcttttcatttcgtcgatgctcctggattgtcatatactcataactatgacgtgcttatgcagtacatgacttgtaatcaagtcataatcagtgggaaagccgcgtatcgagttgagcgcgttgcagatctgtctggtgtttttattgttgagattaaccctggcggcaactgctggaatgaaagactggatctagttcccatgcgagatgtttcatgcgcgtggatgacttcgttaaaacgtaagaccttagtgcgggttgccatcccgcaatatattcattcatgggaagttaagtatgtgattgccgacactgattttgttagaagagttgctgaagtgtcgttccgtcagtataaaccagaaacaccattacaggatttggtgaaatctgttgcgacgatgatttcctctgcttctaaccattgcattatcaatggtgtcaccatgcaaactggtacaccgttggccattgaggactatgtcccaatggcggtgacttttgttgccttcgctaaatcaagatatgattcgataaaggaaggcatgaaaatggttaggcagagaggtactaatatcgcggatcctaatgatcattatgattatgagaaagatggatcggatgttaagagtttttcaaatcacataattcccatgaagaataccatcaagtctctgtttttccccatgaaagtgaagatgaatgataattctatgctcatttatagtcaaggaatcttgtcaactgttgttgatgagataaaaacactttttggatgggatgtttgggacactgacgatgcggtaatacagtctctgccctctttttataagatggaggatgtttttcaagttacgtctgaccactattgtttatcacatacattatctgtggattggtggttggagggactgtatgattcttaccatgacatgcgtgttgcgcataaaaagaaacttgatgaagaagaatctcggaagaccaaggtcgagaatgccttattgaaaattgctgaggttttggagaaacctgatgttagcgatggtcttaaagctctttcagaattgcccataatatcatcattattggagaagaagagcgaagaaatcgttacaaaacctcaatgcagggatactgaaaaaccccatattaatccctatgctgatgcaatcaaagaggcgcaggcctattacgaagagcttgaggtcgtaaatactcgcaatttgagaggtgttggtgattacctcttttggcgaaagaagtcgaactatgccagcgtttggggcgctgatgaatcgagagtggttcttgaacctatggcaaggaagttttactctcgagatagaaatgtttccatacccgagtatgagcgaggtatgacggttgatggtttcgtctccattaaatgggtggacggaaacattactgaggacacgtggaagtgtctttccaaatacgcagttgttttgctcgactcttcttgcgtgtttgatgccggttcacgtattatgccaggtctgaaaaaggcattggtaatggatgcaaatttcaaaatcgtgatcgaggatggtgtggcaggatgtgggaaaacaacatctctcctcaagcaagctaagccggattcggatttgttgttagctgccaaccgtgagactgcaaatgacgcaaaagccagcggcgttattcctaaagcgcttgaataccgagtgagaactgtggattcttacttgatgttgagaacgtggttcacagccgagagattgctcgttgatgaatgtttcttggtccatgctggcttggtctatgcagctgccaccttggcacgagtgaaggaagtaatagcttttggtgatacaaagcagattccattcgtgtctcgtataccaactgtcaaactcagacacgcgtctgttgttgggacgttgaagccaagaacaattacctacagatgccctagggacgtgacggcagtccttagtgagaaattttatggtactaaggttaagacgtttaatcttgttaaacagtctttggaattgaaaaacatagattctagtaccgaaatacctgtagaaaaggatacgctatatatagcgcatacccaagctgataaacatgctttgatgcgtttacctgggatgaatggtatagaagtgttaactactcatgaagcccaagggaaaacaagagaccatgtgatacttgtgcgtttaagtaaaactaccaatttattatattccgggaaaatgcccgatgctggtggttcgcacaatcttgttggtctgtcccggcataagaaatctttgagatattttagtgtctttgccgatgatccagacgatcaaattgcgactggaattcgctggtccaaaacattggatgagcaagagttagcagcttatagagctgctggttag

SEQ ID NO: 527 - DNA, 2394 bp, Spinach latent virus
  source 1..2394: mol_type = other DNA
atggattcttaccacttcttatctcagttgtgtgacttgaatgttctgactcatgcgctttatgttaatcaagtgtttgagattgtggatcagtccacaactagttatatgcagatgtggctttattcccgtgttattgtcccagttttgaaatatcatctcagtggagatattatattggataaattgcacgatgtgttccttggaacctttcgttcaatgatggtgccgatgattatgttgaaccgactttcattcgtcgtgaagatgacgacgatgaaccaccaccggaaagcgtatttgccgcttgaagaaagggaaaaaattcatgctgcgacgtttcttggtcatgatcattgggcaagcgttacttcgggatcatctttttatgatgatctcgaaattctcgctgatgagaccgtgaacgatgatttgcattttgataaagaatcttccatgccagatgagtatcagatcatgtggaatgatggtacaattgattccgtttggtctagtcagtttgaatgcgaagaaccaccgaaaccgaaatttataccacgcccttctgataaggtgtgtgatccagtggttattcaagatgccgtgaacgatatattcccatttcatcatgagatggatgatcgatatttccagacgttagtggagacacaggatatttcccttgaggtttcgaagtgttggatagatgcctccaatttcagagattttgttaagggtccaaattcttatgttgagcctgtgtttcaaaccggtgccactagtaagagagtgcatactcaacgtgaggctcttttagctgtgaagaaaaggaatatgaatataccggaattgcaatccactttcgatcttgatgcggaagtcaacacgtgtttcaaacggtttctcacacacgttgttgatttgccacgattaaaaaggttgcaacctatgactggtgttgaggtggaatacttcaatcaatacttgcttgggaagaatccacctgtgaaggaatatcaaggtcccttgacattgactgcacttgataaatatatgcatatggtcaagacgattgtgaaaccagtcgaggacaattcgttgaagcatgagcgacctttgtgtgccactattacctatcataagaagggtatagtgatgcaggcctcacctcggtttttgagtgctatgtcaagattggtttatgtcttgaaatcaaaaatccatattcccagtggtaagtggcatcaacttttcacgctggatgctggaaaatccgatgccgtaaaatggtttaaagaggtggatttttcaaagtttgacaagtctcagggcgagttacatcacaaagtgcaggagaagatatttaatgctttaaagttacctcccggatttgttgagatgtggttttccgcccatgagcgatcacacattgtggacagagaagcagggattggattttccgttgattatcaacggagaacaggagatgccaatacgtatttgggtaacactttggttactttgatttgtttggctagagtgtatgatttatgcaatcccaatattacctttgtcatcgcttcgggtgatgattctttaattggaagcgtcgaagaattaccgcgcggaccaggagaatttatttacaaccctgttaattttgaagcgaaattccctcataatcaaccatttatatggctcaaagttttagtaagtgttgatcttgaggatggtggaagagaagtgatcgctgttccaaaccctgcgaagttgttaattggtatgggaagacgagactgtcaataccaagctcttgatgatttgtatcaatcatggcttgatgtgatatattattttagagatgctcgcgtgtgtgaaaaagttgctgatttgtgcgcatatagacagacgcgaagaagctctatgtatttattaagcgctctgttgagcttgcctagttgttttgctaataagaagaaatttaagtggctctgttatcgtttaagagagcaagggtgtctgaagaaggatatttatcctgtagcaaaacctataagtgcccataatataaggaaagaagattcaaatggatgcgatgttaatcaaggaacagatgattcgttctcacggaaaaagaatcgtggatgctgggagtatgtcccaaagatgttgcagactgatgtgtctgttcctgttactgataaatctttccacagtaacagaggctcgtcggtttccccaaccgattgcggtgatggagggtgctccagatccgccagctcgattggtagtaaaaataccaaacctcgccatagatttcgagctgcaggagttcaccaacccagcggtcgtgatccagaccgtataccgccgaatcatcgacgaagtgcctaa

SEQ ID NO: 528 - DNA, 2364 bp, Olive latent virus 2
  source 1..2364: mol_type = other DNA
atggccggagtactttatgatgaggagtacgttccccaggaaccggattacttgtattgcccgtacgagtgggagggtgaagatcctacccaatgcgatgcaaatgttccgtccgtcagctaccttgtggaggctgtaaaaaaatcctttactgagggtaaccacgatatgctgatttcttgcgagtcgtaccacgccgagtgttgcgagggtcccttgatgaacaagggtttgaccctctcgacttactttatgagttatccgggcatttcattacctgcgttcggcggtggtgtgattcatgtcacttcagctcgcgtctgcatgcaagctttttatgccgtgaccccaggaaggtgtagttgttcgtgtggtacgcaattcatctatcgtgccaaaggtggaactggtctaacatttgacgccacgaacactatttctagtgcctttaagttcgaagacgggaaagtgaaatggttaacagaagacctaggcttggcattattggctggttgtttcttgaaatacgtgccaatacctcatgagattgaaattaagatcgaaagaaaggtcgagcccgtgtctgctctggatttttgggaaccagaaggattgatttctgacgtacatttcgtacatccgcaagagagagccttggctcctgagcctccaatggatgtagagatggtgagattagtccgtacggaattgtttgaacactttaatcccacccttcttctgaacgctcggtcggatttttccggtgagaaactgaaagaggttgagttgccacgagctcaatcggaacccttagtccctagggtctgtctcccgcgaggtgatgacgctttaattgatcagtttttcatagacaaggcacccgagcattttaatcgtgaacctgccacagatcaatggcaggtggaatctgatgactttactgtggatttccccacccaagtgcgattacgcgaacgggacgaagattggttcagaaggaaacccgatttcgctgtgtcgtccattcgtacaggtctcgagatgcctcgaattgctacaaagaaggaaatgttaatggcattctcgaagagaaacgttggagctcctcagatggtagaggtacctcaggagatccacgtgaagaggttggctgataggttcttccggacattcttgaaagaaggcggctgggataagggggatggtcattattgggatgattttttccatagaaagggtcgaaaggtcttttcattggagaattgttacgatgaccccttgtcctcatacttagttatgctgaagtccgctgggaaattctctctagatctgaactttccggttcgatcggtaccccaaaccattacttatcatgagaagtgggttaccgaggttttttcccccatgtttctgcaggtgatggcaagatttttctctcgtctgcaagattgggttgttgttccggctggtccgatggctgacttctcccgtgtttggcctagctttgaggggaagtgtttaacagaaattgatctgagtaaatttgataaatctcaaggtaagctgttgcatgatgtgcagagggagattttcctccgtctgggtttcccacccatttggtgtgattggtggtttaaattccacgagtcttcctatttaaatgataagaaccttggtatagctttctcagtagattaccaacgtagaacaggcaatactgccacttactttgggaacacgttggtaacaatgattatgatggccgaagtgtatgaacttgattctctccctttctgtggtttgttttcgggtgatgacaacttgatcgtgactgatcgacctcttgaaggtcgagtttcgttattcccgaacatgttcaacatggaggccaaggtgatgcgtccgggtcagaattacatgtgtagcaaatacctttgcactgtagacggtcgcgtaacccctgtccctgatccttttaagttgctgaagaaagctggtgcctcgtgtcctttggagcaccttgatgacttttacgaatcgtttctggattataccaaatacctggtgagggatgaagttagaacattaatacccaggttgatggcccacaggtatcaagtctcgatggatgaagctggagttgctcttgatcagattatgagctggcgaaagtcaaagactcaattctttaagcatttccagtacaggaaaccaatcaaggactcgctcgaggctgtgaaatccgacttcctttctgctttcggaaaagtagatgatcgaataagagtttggcgcgggcgtcgaaccaatcataagaaggaggtcgatgctttaaaggtcccattggtgagttttagggagtga

SEQ ID NO: 529 - DNA, 4950 bp, Citrus yellow vein clearing virus
  source 1..4950: mol_type = other DNA
atggccactattaggggtgccatcgaacgcattacagacaccaccgtacgcactacacttcaagaggaggcatgccgccaaatacgcgctgaacttaaaaacgtcgaacacatcaaccgttacgctatacagcctgacgccgccgacgcactcgaacacctaggcattggttctaaccccttctctgtggcactgcacacacacggtgcctgcaaagcgattgagaaccaattactctatgtagttggtaccttactcccaaaagaacgtgtcaccatgctcttccttaagaaaagcaagctcaacatcatgaaacgctgccctaaattccaagacatcttcctgaaccaacatattgaaccacgcgacgtttctaggtactgcgactttaacgtccaatccacctccaccagcatacccacacgaacggcttacatcagtgacacactccactttatggaccgtagagacctagtccgactattcctaaacagcccaaatctagagactctctacgccaccattgttctcccagtcgaggctgcttacaaacaaccgagccgctacccagagatataccagattaactatgacttcgacggtttccagtacatacctggaggccatgggggcggcgcctaccaccacgagttcgaacagctgcaatggttagacactggccatatccactggcgtgggcccgactgtaaagagattcgcatgacaattaccgcccaaatgctcgaaagcttaggtgcgaatcatcttttctgcttcaaacgtgggaaactactcaccccacgtgtacgcactttcggccgagatacccaagtgctcttgcccaaaatcttccgcccggccgacaaaaactttaacagggcaataccactaaccctagctaacaaactactcctgtacgctaaatccattaacacagtgaccttccgcgacgtcgttgccaagacacgccaacttatgaaggacaaggagcttgaaacatacaccggcaacgacctgttgcatatggccaactatttcttcgctgttggagcactgtcaggagttaactcctatgaccaattgcttggcctatccgcctgggaagcctgcaccgtccgtatcaagaacaccataacaaatctctgggaaaagattgccggaaagaaagagttcggcaagctattggaggcccttgagtgggaaacattcacatactcacgtcaagtgaccgaattcaccgttacgggactgcccgccctgctccccctcccagacatctcagaccaagaagagattttcgcccagcaggacgagttagacaaaatcactgccggcgctaccaagatacggactattgacattatgcggggacaagctaaccgcgctaacccaaaaactccgatcaactcaacaccggcccagggaccccaactgcccgatacccccgacccaatcgaccaagctgcctccaaagacctcgtcaccaagcttcagaaaaacaaacgcatttacatccaagacgacgggccggaataccttatgggacacatggctgaagtccctgcctggtatcttgaacaagatgataccaccactagactcaaaaaccgctgcgcttggttcttcggcccacccacctacagatatgggcacaacgacattgagtacaccaccatagaatactacccttgggtcgagcgtattggagccattttcggcaagtacaacacctgtcttgctcaaacttacgacgccggagcccgtattggataccacgctgacgacgaagactgctacgaccccgacgtcaccgtggtcaccatcaacctcactgggaacgccaccttcctgctcaagaccccaaccggcactaggacctggaaacttaaacctggtgacttcattatcatgaaacccggtgcccaaaggtgcacaaaacatgccattagagattgcacaactaaccgcacatccttaaccttcagatggcaggcccgcacttgccccactaacctcagaaagatcactaacctacccaaagccaccaaccaaccccaaaccactgaatggcgtcctgtaactaaaccacgccctagcaccaccgcttccagcgacacccagaccccacttgtcatagaccaggaacgagggtataccaccacctccgacgtgacaccaacgattaggctgcccgccgaaaatggtaataacaccggtgctggaccctcctccgcattaaccctcgccgacctgaatgataaccaagcgccgaccactaacaaaggaaaagagaaacttgaggaaatggtcgaaactggcccaactatcatggaacgcttcctcaacaccgttcaggaaccaacacaagatttatgggactccgcctctgaatccgccgcgagctacctcgctgaaggcctcggcatctctgccatccaagcactcccttgggcacctcacttggaactcatcaatgcattaggcttccagggcactgaaaggcaatacggcccagacaactgtctcatatggcctatcacgcattacagagaattgcccagaagcaacaatgtcgaagcccctccggaagtgcttgagctgctcgactgcatcaatagataccccactgacgtcccaatgctcaaaactcgagccgccgccttcggttcagacgtcaagaatctacgcataggggcacttgttaagaaccaggacaaacagtggcgcgcatcactcgcactactttgtgaggaaaatgaacacctcctccctaccactgtaatacacggcgctggtggctccgggaaatcccacttactccaacagtgggtggcgtctactgagcgcggaaatgtagtcaccatcttgcccactatcgaactccttcgagactggcaaaacaaatgtccacatgcaccgaaagagactttcaaaaccttcgagaaagcgctcatccagaacagcgcccccgtggttatcatggacgactactctaaacttcccccagggtatattgaagcctacgtcagcctcaagggccagtgcaaacttctcatactcactggagatcctagacagagccactaccatgaggagaaccctgaggccttaatctctactcttgaccccgccacggactactttggcaaattttgcgcatacaacatcaacgccactcatagaaatgccaaaaccttcgccaatgcgcttggggtgtactctgaaaaagaaatccccaccaccatcacctgctcatcctaccagaaaagcggttggccaacacttgtcccatccatccttaaaagaactgcgctcaacgacatggggcagcgctcactaacctacgcaggctgtcagggactcaccaccccaaaagtgcagatagttcttgacaacgccacaccactatgctctgacaaggtcatgtacaccgcactatctagagcggtggaccaaattcacttcttcaacactggcccaaatcacactgattactgggaaaagatgaacgccacacctttcctcaaaactttcatcgaccacacacgtgaggagaccttcgctgagcaccaacctgccgaacccacagtgcgtgagtacgcaccagcaacgcatttcccaccggctaacgagaacctagcactagagccgtgggtcgaaccgctgactgataaacactcgcgggaactcttccactctgccttaggccacagcaactgcgtccagactgaaaacaccgtagtccaactttttccccaccaacaggccaaagacgaaacgctcttctggaaaacaatagatgccagaatcaagataaccaccccagaagagaacatcagggcttgcagcatagccactgacattggcgacatcttgttcctaaattacaaagaagccatgggtttaccacaagaccccatacccttcgaacaggcactctgggactcttgtcaagccgaggtgcaactaacctacctcagcaagcctctggctgcactcgcaaatgccgcccaaagacaagaccccgactttgactccaacaaaatccaactcttcctgaaatcacaatgggtcaagaaagtcgagaagatgggctgccttaggatcaaacccggccaaactattgcttccttcatgcaacagactgtcatgctatacggaactatggctcggtacatgcgccgcatccgcacctcactttgcccacccgaaattatgatcaactgcgagaccaacccaaaccaaatcggaacatgggtgcgtgagtattggaacttcaacacccagagccatgagaatgactttgaagcgttcgaccaatcccaagacgccaacatgttacaattcgagctcattaaggccaaataccactcaatccccgaggagatcatcgccgggtatcgacacctgaaatgcaacgcccacatcttccttgggactatatcgatcatgaggttgtctggtgaagggccgacctttgacgccaacacagagtgctccattgcatacaaccacacaaggtactttgtgccgaaaggcaccgcccagctctacgccggagacgactctgcatgcgcgtcgcccctctctgaaaaacccagcttccaacatatctcaccagagctcagcctcaagtctaaggccaagattagaacccaacagaaaggagactttgcgaccttctgtggctggctcatcactccaaaaggcctgatcaaaaaccccacccagctttacgcctcctggttattggctaagcacaacaaagatctcgcggacgtggccagaaactatgccttggacttacgcattgcctatcaacttaaagacgagctctatgagttattatcacctgaagaacttgaccaccaccaactgctcgtccgagagatgatcaagcacaaaatgggccatctcctcaacctccctgaggggtttaaaacaaactaa

SEQ ID NO: 530 - DNA, 5343 bp, Potato latent virus
  source 1..5343: mol_type = other DNA
atggctttgacttacagaagtccattggaagatattgttggtgcatttgaaccaagtgttcaaacagctattgcgaacacagctgctaaccactacaagcagcttgaggaagagaagggaatcttatttaattatgcattgccacctgaggccaaacagaggttaataggcgctggcatatatttaagtcccttttccgctgttccacattcgcatcctgtgtgtaaaattttagaaaatcatctgttgtatgtagagcttcctagtagactagataattcttttatgtttgtaggtattaaaaactttaagttggatctgctcaagcgcagacatgcaaatctaagcatgatccaaactatcaatagatatgtttgtagtttagataaaataaggtacggttcaaatttcgtagttagatctagcgctagttatccagagctttgcagacgcaaaggtgagcttgacggagcagtgttgagggaattggtgcctgagttgatgattaaaagcgctaagaatctattcttgcacgatgagcttcattattggacccatcgggatctgattaccttcttggaggtactgaagccagacaaactgttgggcaccttagtttacccacctgaattgctaaagggtgcgaagaaaagtttgaactcttggtgctacacatatagagtggacaaagacaaattgtttttttatccagatggcgtccattctgaaggctacgagcaaccattgagtggcggttacctcctcgaaacaagtaggattaccacacgtgatggtgaagtttattgcgtcgatgttgtgtgcagtaaattcgcgcatcatttgattgcaataacccgtggtgatctgattgtacccacacaacgcagttttgctccctttgaggccataactagtaaaggtttgaataacttggtgaggggcaaggtggaatgtttccccgtatgcgcaagtgtagtgtctaaattgtataggtatttgcgcacactcaaaaaacccgatgagcaatcagcaatggccaaattgagccaacttcaggcaaatcccactggggaagagatacatttcatccagggctttgccaaattggtgataaatacaaacaaaatcgacagtttaatcaactgcgatagtattaaggtgttcatgggcaaattgtttggtccgttgcccaattggcttaccaagagattgaggagcgtgcaagaggtgtctctcgatgaatttgtccattactttgaaccatatgtcgtcaacgtgcccactaagcatgtgaactatggttttgagttcaattacgtaatggaagatttcaggtacgagcagggtgagaatgatctagtggatatgctagacaattttgatggctccacaaagatgagcacaagcctttgcatgatgaccccatacgtcggcttagcaccattgaccacgcgacgcaaattcctatgccatatcgaggagaattccatattcagagtggtgtctaggaacatcttttgtagctacacaaatagttacaaagtggccgtgagcactgagggggtggttcggatacttgagatttatagcaaagtgtctgtggatctactgggagcgtatttgggaaaattgctcaagaaaacagagttcatagagagagtgcgatcaagggttaaggcaattgccataaagcacctcaagtacacttggcaacaggttggtctagcttggttcaccagtggaaggcgtggctacacaaaatacattgattgcagcccatacacgatgaataccttcaaagagcttaaagagagatggggtgtgattgtgcgtgaattgtctaaacagcaggacaacgctgaagctgcgaaaaacatacctgagcaggaaattcaaacgaccagcaaaccaagttgtgtggagaagcgaaattacttctcgaacactttgatgactagctttgctgcgtcaggagtgaaaggcaaggaacaggtgagctccgaaattgccaagggtaggggtgaaaggagcgaattgagggcaactaaattgatgggctcatgcagcaccctcggcaaagtggctcacatagcatcaagaaaaggctccatgggggtattggaatgtgtagcgagggtcatcaaattggatttccaaaccgccttgaagttccttagagtcaagggtgtgtggatgcaggagtatgagagcataggcgagttggaggaggagcagatacagagtcctgcatatgatttttgtgctgcgatcgcaatgaccttcaatgttgaaattgaattgacgttcccaggctcagagcttgtttaccacttcgctgcaagttcaactgtgagttgtatccgcttgagcatttgggaaggcgtagtcacactgatgagggctgaaaatgattgcgttatcactgcatgtgcacaagctttagctagggagcctgaggatgtagtgaaggtgctcaaagatagattggaggagagcatactggaagagatttggaacggcgaaggggtgcctttcgagagaatgtatctcttctttgaagctctggatattcaagcacattgcaatcgcgatggtgcacagctagtgttgaatggcgggggcaagctggcgcgatgtttcgtgattaaagaagatcacatcgagttcgcaggtgagaaaaaggtcagtagagtacttgagctccaggatgctagaacaagtagtaaagcagacccagaattggtcaaggagtttcagaaagccgggactgtggtagaatatgtagcagtgcaatccagagcgcaagtcctggcgaagagtctagtggatgcaaccactggggtgtgcagctcaaccatattcaatgactgtgagagcttggaacgttcctttagattcaccgaaagcgaactagcgcgaaatgtttgttgtgttatcggtacgtttggggctgggaagagtaccctgttcaaggatatgatgaggcagtgcctagggaaaggtgttcactacgcatcacctaggaaggtgttggcgaatgagctcaaagctagtttgggtttggcaaaagggaagcggaatcgaaaagtagggacagagaattggaatgtgcacaccttcgaaagtttcctaaagaaggcgaaaaatgttgcagagggtgagttggtgatcattgatgagatccagttgtacccgcctggctacctggatcttctactttacctcatacctgagttcactagcgtcttcgcggtcggtgatccatgccaaagtgattatgacaacgagaaggataggcatgtcttcttaggggttgagacagatgtctgtaggcttctgagcggccgtgagtacgaatttaatgtactttcccgcagattccacaacttaggctttgaaagcagattgccctgcagattcaaattcccggctggagcagtcaaggaagagtatttgttcgttaattcaatgactgaggctaatgagttggacagcgcctacaaaagtgtgtaccttgtgtcatcccacttggagaagaaaatagtggagtaccagagtgacgttaaaacgccgaatgtgctgacgtttggtgagtcgactggttgcaccttcaagtatggttgcattctcatcacgcaagtgagtagcgcatgtagtgagcgcaggtggatcactgctctatcgagattttctcacaatctctgtttcatcaatgcaactggtgtgcccatagaaaatgtggcgaagagttacaaagacagaagtttgggaaaattcctgtgtggaactgctgttgagggtgatataaaatcaatggcttatgggaccccaatcttcaaagagcagttcatcgccggcgttgggcgcgatgaaggtgtcaaggaggataaagtcaccggtgatccttggttgaaaaccatgttggatttgatgcagctcccagatgttgaggaagcagagatgatgcaggaagagatgcaagaagagtggttcaaaacccatttgccacaagaggaaatagaaggggtcagatgccgctggattcacaaaatgctagctaaagaagcgagggaatgtagaatgggatcgatcgtttcagaccaattcccagatgatcatagcaagcaagaggggaagcaaatcactaatgcagctgagcgttttgaagctatatacccaagacatcgggcaaacgacacagtcacattcattatggctgtgaagaaaaggctgagattttccaggccttctgttgagaaagcgaagctcacgcaggctgaatgttatggaacttacctgctcaaaaacttcttggatgtgatcaagctcaagcccgcacatgatgaggcaatgatgatcagagcgaaggaagattttgagcagaagaaggtgagtaagagtgctgcaaccatagagaatcacagtgggaggtcatgcagagattggtgcatagatatagggcagatcttttcgaaaagtcagatatgcaccaaatgggacaacagaatgcgggtagctaaagcagcacaaacgattgtttgctttcaacatgccgtcttgtgccgctttgctccctacatgaggtacattgaaatgaagctgaaagaagtgctgccggctcggttttacattcatagtggcaaaggtttagatgagctcaactcttgggttaaagaaggtaggtttgagggagtgtgcactgagtccgattatgaggcttttgacgcttcgcaggaccagtacatcgtcgcttttgagttggcactgatgaggtaccttaggcttccaaatgacctgattgaggattacaagtacataaagactcacttgggttccaagctggggaattttgcaatcatgcgcttctctggtgaggccagcacttttctattcaacacaatggcaaacatgctcttcaccttcatgcggtatgagcttcatggcgatgagtacatttgctttgctggtgatgacatgtgttcatcaaagagattgcgaatcaagaaaacacatgaaagctttcttggaaagctgaagttgaaggctaaggtgcaacacactgagaagcccacattttgtggctggaatttatgtgctgatggaatatacaagaagccacagctggtctttgagagaatgtgcattgccaaagagctcaacaacctgcacaactgcatcgataattacgcaatcgaagtggctttcgcttacaaacttggggagctggctgttaacaggatggatgaagaggaattgggggccttttacaattgcgttaggctcataacaaaattcaggcatctgctcaaatccaatgtagtggaggtctttaagcgtaaatag

SEQ ID NO: 531 - DNA, 6318 bp, Apple stem grooving virus
  source 1..6318: mol_type = other DNA
atggctttcacttacagaaaccccctcgaaattgcaatcaacaaacttcctagtaagcagtctgatcaactgctttccttgaccaccgacgagattgaaaagaccttagaagtgaccaaccgcttcttctctttttcaatcacaccagaagatcaagaattgttgactaagcatggtctaacacttgcacctatagggtttaagtcacactcccatccaatatccaaaatgatagaaaatcatctcctgtatatatgtgttccgagtcttttatcctcctttaagtcagttgcctttttttcacttagggaaaataaagtagacagttttcttaagatgcattcagtcttttcccatggaaaaattaaatctttggggatgtacaatgctataattgatgggaaagataaatataggtatggtgatgtagagttttcatcttttagggatagagtgattggtcttagagatcaatgccttacacgtaacaaatttccaaaagttctgtttcttcacgacgagttgcactttctaagtccatttgacatggctttcctatttgagacaatcccagaaattgatagagttgttgcaaccacagtttttccaatagaacttttattcggggacaaggtctctaaggaacccagggtttatacctacaaggtccatggctcttcattttcattttatccggatggtgttgcctctgagtgttacgaacagaatttggcaaattctaaatggcccttcacctgcagcggcatacaatgggctaacaggaaaattagggtaaccaagctacagagtctcttcgcccatcatgttttctcatttgacagggggagggcttgtaatgaatttaatcatttcgacaaacctagctgtctacttgcggaagaaatgcgccttttgaccaaaaggtttgataaagcagttattaacagaagcacagtctcttccctcagtacatacatggcttgtcttaaaactgcaaatgcggcttcagctgttgccaagctgaggcagttggagaagagggatctttacccagatgagttgaacttcgtctattcctttggagagcatttcaaaaattttgggatgagagatgactttgatgtgtcagttctacaatgggtcaaagacaaattttgccaggtcatgcctcacttcatcgccgccagtttctttgaaccaacagaatttcatttaaacatgcgcaaattgttgaatgatctggctactaaaggaatagaggttcccctttctgtgatcatcctggacaaagtcaacttcatagagaccagatttcatgccaggatgttcgacatagcacaggcaatcggggtgaacctagatttactggggaaaagatttgattatgaggctgagagtgaagagtacttttcagagaacggttacatctttatgccctctaaatcaaatccagagagaaattggattctaaattccggttcgctgaaaattgactattcaagattggtaagagccaggagatttagattgagaagagatttcctagatcccatatctaaaggaaaatcccctagaaaacaactcttcttggagtcaacgggaaacattaaatcaaatcccaatgctgaaaaaaatagcgagagcggcgaaataaagattgaaggcagtgccgaaaatgatcagccacatgaggtatcacatacttcaatggaaaccgaggatggacagggttttgaaggttcaataccagttgatttaatcaattgctttgaaccagaagaaatcaagcttccaaagagaagaaggaaaaatgattgcgtcttcaaggccatctctgcacacttggggattgactctcaagatttgttgaattttttggtaaatgaagacatatcagatgaattacttgattgcattgaagaggacaaaggactgtcacatgaaatgattgaagaagttttgatcacaaagggtctttcaatggtttatacttctgacttcaaagaaatggcagttcttaatagaaagtatggagtgaatggcaagatgtactgcacaattaaaggcaatcactgcgagctgagttccaaagagtgcttcatcagattattgaaagaaggtggtgaagcgcagatgtcaaatgaaaatctaaatgctgattccttgttcgaccttggaagatttgtgcataatagagacagggctgtcaagctagcaaaatcaatggcaagaggcacaacaggcctcctgaatgaattcgacctagaattctgcaagaacatggtgaccctttcggagttgtttcctgaaaacttttcttctgttgtcgggctaaggcttgggtttgcgggttctggtaaaacgcataaggtgcttcaatggattaattacactccaagtgtcaaaagaatgtttataagtccaaggagaatgctggcggatgaagttgaacctcaactcaagggaacggcctgtcaggtgcatacatgggagactgcacttaaaaaaatcgacggaacttttatggaagtttttgttgatgaaataggtttgtacccacctggataccttacactgctacagatgtgtgctttcagaaagattgttaagggacaaagtgaaaatttcttgaaaggcaaactgttggaattgtcaaagacttgcttaaacataagatgttttggtgatccattgcaattaaggtattactcagctgaagacaccaatctattggacaaaacacatgatattgacctcatgatcaagacgatcaagcacaaatatcttttccaagggtacaggttcggtcagtggtttcaagaactggtgaacatgcccactagagtggatgagtcgaaattctcaaggaagttctttgcagacatttcaagtgtaaaaactgaagattacggactcatcctagttgccaagagagaagataaaggtgtcttcgctggaagagttcctgtagcaacagtgagtgaatctcagggaatgaccattagcaaaagggtgttgatatgtttggaccaaaatctttttgccgggggagccaatgcagccattgttgcaataacaagatcaaaggtcggctttgactttatccttaaagggaattcattgaaagaggtacagaggatggcacaaaagacaatttggcagttcatcattgaagggaagtctattccgatggagaggatagtgaacatgaatcctggagccagcttttatgagagtcctttggatgttggaaattcatcaattcaagacaaagcttctaatgacctgttcataatgccttttataaatttggctgaggaagaagttgacccagaggaagttgttggggacgtaattcaacctgttgagtggttcaaatgtcatgtgcctgtcttcgacacagatccgacgcttgcggagatttttgataaggttgcagcaaaagaaaaaagggaattccagtctgtgctgggtctttcaaatcaatttcttgacatggaaaagaatggatgcaaaatagacatcttgccctttgcgcgacaaaatgtttttccacatcatcaagcgtctgatgatgttactttctgggcaggtgttcaaaaaagaattagaaagtcgaactggagaagggagaaatcgaagtttgaggaatttgaaagccaagggaaagaacttcttcaagaattcatctcaatgctaccgtttgaattcaaagtgaatatcaaggagattgaagatggagagaagagctttttagaaaaaagaaagctaaaatctgagaaaatgtgggcaaatcattcggagagatcagacattgactggaaacttgaccacgcctttctcttcatgaaatcacaatattgcacgaaggaagggaagatgttcaccgaagctaaagctggccaaactttggcctgtttccaacatatagtcctatttagatttggacccatgttgagagcaattgaaagtgcctttttgagaagctgtggagactcatactacatacactccgggaaaaacttcttctgcctggatagctttgtgacaaagaatgcaagtgtctttgatggattttcaattgagtcagactacacggcctttgactcatctcaggaccacgtcatattggcctttgaaatggcactgttacaatacctgggcgtgtcaaaggagtttcagctagattaccttagactgaaattaactctcggatgccgtctcggatcactagcaataatgaggttcacaggagaattttgcactttcttattcaacacatttgccaatatgctgtttactcaattgaagtacaagatagacccaaggaggcataggattttatttgctggggacgatatgtgttccttgagctctctcaaaagaaggagaggggagagagcgacaagattgatgaagagcttttccctaactgcagtagaagaggtgagaaaattcccaatgttttgtggatggtacttaagtccatatggtatcattaaatctccaaaattgctgtgggccaggatcaagatgatgagtgagagacagcttttgaaggaatgtgttgataattacctatttgaggcgatatttgcctacagattaggtgagaggctttacacaattttgaaagaagaggattttgaataccattatcttgtcataagattttttgttagaaattcaaaattgttaacagggttgagcaaaagcttgatatttgaaattggggagggcatcgggtccaaatggctatcgtcaacgtcaaccgcttcctcaaggaggtcgaatctacagacctcaaaattgatgctatctcgtcctcagagctttacaaggatgcaacctttttcaaaccagacgtgcttaattgcatcaaaaggtttgaatcaaacgtcaaggtttcctctcgatctggtgacggcctcgtcctgtctgatttcaaactgcttgatgacaccgaaattgattcaatcaggaagaaaagcaacaagtacaaatacttacactatggagtcatcctggttgggatcaaagcaatgttgccaaactttagaggcatggaagggagagtcattgtatatgatggagcctgcctggatccgaaaagaggccacatttgctcgtatcttttcaagtttgagtctgactgttgctactttggtctcaggccagagcactgtttgtctaccacagacgcaaatttggccaaaaggtttagatttcgtgtggactttgattgtccacaatatgaacaggacactgagttgtttgctcttgacattggagttgcatacagatgcgtcaactctgcaaggtttttggaaaccaaaactggcgattcaggatgggcttcacaggcaatcagcggctgtgaagcacttaaattcaatgaggaaatcaagatggccatcctggatcgcagatccccgctgtttctggaagaaggtgcaccaaacgtgcacattgaaaagagattgttcagaggtgacaaggttagaaggtcacgctcaatttccgctaaaagggggccaaactcaagggtgcaagaaaagagaggatttaggtccctctcggctagaattgaaagatttggaaaaaatgagtttggaagacgtgcttcagcaagcgaggcgccaccgggtaggagtatatctatggaagactcacatagacccggcaaaggaacttctgacggttcctccccctgaaggatttaaggaaggtgaaagctttgagggcaaagagctttaccttcttctttgcaaccattactgtaaatacttgttcggtaatattgctgtctttgggtcatctgataagacccagtttcccgctgttggatttgatacacctccggttcattataatttgacaacgaccccaaaggaaggggagactgacgaaggaaggaaggccagagcgggttcgtctggcgaaaaaacaaaaatttggaggatcgatttgtcaaatgttgttcctgaattgaaaacctttgctgccacttccaggcagaactctttgaacgaatgtacgttcagaaagctttgcgagccatttgccgatttggctcgagaatttctacatgaaaggtggtctaagggattggccaccaatatttacaagaaatggcccaaagctttcgaaaaaagtccatgggtggcctttgattttgccactggtctgaaaatgaatcgtctaacacctgatgagaaacaggtgattgatagaatgaccaaaagactttttcgtactgaaggacaaaaaggggttttcgaggcaggttcggaaagtaacctggaactggagggttag

SEQ ID NO: 532 - DNA, 5889 bp, Citrus leaf blotch virus
  source 1..5889: mol_type = other DNA
atggctttgatgagcaacaaaactgcaattgaatctattttgggtaactttgaaaagaaacacgtcgatgcaatctacaatgccgccgcacaaactatcctctctcactctgaatttaggaataagcattttgcttattcactcaattcttatcaaaagaagatagcctcaaaggtgggtattgaattgtatccaaatggttatttaccacattcccatccattgtcaaaaatttttgagaaccatttgctttttgatgtacttcctggcgtagtaaatactagtagattagttatgtgtagcataaaggagtccaaagttctggtttttaaagggattcgcgacaaatccagaagacaggtttcagacctcaatgccctcaattccttaaataatagtcatacatcattcattaataggttagttgcatccaaagatgtgagtagatatacggaagaagctgatgctttttttcaatccaagaaagggagtccggagctattttcaaggaatttcatcaaaagcttggaaaataaagaggctgttttttttcatgatgaagttcatcactggactaaggcccaaatgttctcatttcttaaaagcacgaaggtcaaaaggttcattttcactgtagtctatccaccagaaattctcaaaaaatttgccaattcccagaacccaaaggtttatgatttcaaagttgataagggtcggctttttttttttccggatggggttaagacagaggcctatgagcagaaattgaatatggagtggctcttttcagcatcacatcttcgcagtggagactgtgtatggactgtaacaagacataagagtatttatgctcatcacctgtttgagatatccattggcgaactagtcacggactcaaaactttttttttccgattataactccattgacatgtctaaaatatttcttgatcgttttcggagttatgaggtattccccatttcgattgagcacctttataaggtctactcttatctgctttgcctcaaaaaacctgacttggagagtggtctagctaaattaaggcaaattattggagatgatgtcgaaatcaaagaattcctcttctttgaacaattttgtaagcgcttaattgaacgccaaacctcttgggggctatttgggcactctttctttgaaaaattaaccgatatggcattgtcatccttgcccaactctatagcccgaatttttcctcaatggaaaaaaaaaaacacatttgagttccttttctcacttgggactcttgttgtggatgtggagagaaaggtgtgttttgaacatgtgcttgaggaatggggatttgaagttgttatcactgatgaaaatgcctatcttgatccactatctatctttgctatcaatgaaaattttaatgaggatagagtggacgatggttatttggaaagaatccgtcttcccttctggaatctgaatgactatgacttgaaaagaaagagggtaaatgcgtataacattctctcttatcgatttgaagaggagcgaaaaattgaatcagcgcaaaaaggtccaaataagatgctccagattgagtggtacgggattaaagaatttaaagttgacccttttatcagcaactccataactgaatttactcttttagaagcattgctgggaaagaggatagatccaaaaaaatactcatattcaaagcaagcctgcactctttccaactatctcacatttttgtgtgctgagggtttggatggattcaatttggaagagcaccttgaacgaaggttgaaagcggccggtcatgacgtttcagatgacgaggaggaagaattgacttcagctgaacaagcggggcctatcaagatattggctgatccacttggttttatgaaagagtgtttggaggagatcccaatcgaaactgaaccatcactggaagaaagagggcagttttccactgattatcattctgagaaatttgaaatcaattacaatgacatttttaatcctcacaattgcatgaacactcacggcgatgaaattcccacaccgtcagatggcaattgttttttttcagcatttactgaaacttttgaagttgaaagacctgacaccttgaggtctgatttctcagactggcttatggaatttaatggggggtcctatgcttcacttgcagaaatgatcagaccgaatggagtttttatggaggcagaactcatatacttgttttgtgtatttagaggagtcacgttgattattcatgatagaactcatgaaaaagagaatgtttatgctgtacaccgcgggtttgaggagggccatatggtacatagaggcaatcattttgtcgggattgaaacttacaatattagtactttaacctcagaccccttacttggtgacatcccatgcggtttttcagaggaaattacaaaattccattttcggcctgatcatttcaactgtgcccagttcagaggaaggaaggcggcttttatcaccaaagttgatgcagattacgggcacaacggtatggtttacccccacaattcatgggtaccttctttagaagagatcattcagatctgtggtcagggagatgatttcaattgtgcattaataaatttctatgaggcaaactcatctcttgggttccatagggataatgaacgggtgtacaatgatgatcctattttgaccgtctgcacattcggtgaaggtagattcaccattgaatttaaggatcaggtaacttcttttctaatgactgctggctctttctttttaatgcctaaagggttccagaagaaggcaagacactctgtctcaaatgaaatgtcgagagtctcgattactttcaggaagcatgttagaaggttgaatgggtcaccgattgccatcagggaagaaaattacaaaaatacatgcctcattaatgccttttcaaaagcaatgaaaaggagcaaacaggcaatcattgcaaaactgaagactgttaatagccctttctggagtagatacctatctgagggtaacggtggctccattgaagattgtcaatcggcctgtgaggcactggatgttactgtcgaccttaatgtaaatggaaaatgtgtggttcttggaaaaggggctttaagaatctcaatggctttaagaaacaaccatttttcagttatcaatgctgcacaactgatggagaggacttttgttagccacttgcttgaaaaaggaaatgtcaatgtgttagaaggatttgacgcaatgctaagtggtgatgtgggcgcagcaggtgttaacaaaattcaatttgcagccaattttgaatttgctagaattttggcaaattcatttctaaatatgacaactggcatctgcctgggcaaggcattggataatggggaaaagtattttctccacattttgaaagatagagtgaaacagattggtatagacgtcacaatggtgtgcggatttgctggatcggggaaaagtcgcaaactgcagtcctggctgcattcaaggaaaaaagggaacttctgtgtggtttccccaagaacaaacttagccgctgactgggcattcaagttagaattagagcccaatgaacagagaaaggtttcaacatttgaaaaattcatcaaaactgataaaagcaaattagatctcatagttattgatgaattgacattgtttccaaatggttacctggatctcctcgtgtatgaattggctgatgtcaataggcattgtcaaatcatccttctgtttgatccattgcaagcaagataccacaacaaaatggatgaatcaatcctgacatttgaacatgacgtggacaggcttattggtggacagaacattgagtacatttacagcacgcatcggatgtccagatacttcaatagattttttgatgtaccttgcttcaatcaggctgatagaacagaggaacaaaggttgtggatatttgatgacgtttactccataccatccatttgctccgaccgtcaggaaccatgtgatgttcttttggttgaatctgaccttgaaaagaaggcattttcacccatcataaatgttatgacatttggtgaatcccagggactcacatttaatcatgtttgtattttgctgtcagagtccagtgcagcttcaaacgaatttagatggatggtggcgctgacgagagcaaggaccaggttttcactctgttcaaccttcttaggtggaattgaagaatttaaagtcaaaaggaaggaaagtctcatcacatccatactccaaggcgagaagatcacattcaacagattaaatctgatgctgaaatgcaatttaattaggagagaaaaagaaaatgggtgcagagatgaggtcgatagggaggaaaggttggagggtgaccctttcctcaaaccatttatcttcttgggacaaagagttgagaaggatgaagatgaggtagaagaagtgaagatcagggaaccaacctgtcaaactcatctgtatataacagagcctaattttggtttgtgctacaatttcgacttcattagggaaaaagaacagcgggaatacagagaggatatgcttgtaactaaccaattctgtgacagttatgataaggttcatataaacggcaaaagagaaacccctggtcccctgcgattcaaagcgatttatccaaagcactcagccgatgatgacatgacgttctggatggccgtcagaaaaaggcttgtatttagagaagaggaggagaattatcaaaggttgtcaagggcgcatttagttgggggtttgctatacaccaacttcaaaaaaaaaatgggcctggaatttacgtttgaccaaggtctactggaggaaagcataaatgcatttgaaaagaaaaagctggaaaaatcatgtggcacaattaaatctcatagcataaggtcggacattgattgggcgctgaatgatgtatttcttttcatgaaaagccagttatgcaccaagtacgaaaaacaatttgttgatgctaaagcgggtcaaactcttgcctgttttcagcacctgattttggtacagttcgctccatggtgtagatacctagaaacccagatcagaaatcagttgcctgaagaaatttacattcactcaaataaaaattttgatgatttgaatgcatgggtcaaaaaatttttccagagggatatctgtgttgagtctgattatgaagcatttgatgcaagccaggatgaatacatattatccttcgagattcatctgatgaaagatgcgcattttccgcagaaaatcattgatgcatacatagaccttaaatgcaaattgggatgcaaattgggccatttttcaataatgagatttacaggggaattttgcaccttcctattcaacacactggccaatatggcattcactatgtgtagatacgaatggaggagaggacaaccaattgcattcgcaggagatgatatgtgtgcattaaacaatttggctgtttgtcatgatttcgatgacctttttgaactcatcagcctaaaagctaaggtggaaaggacagaaaccccaatgttttgtggatggagactaactccatatgggattgtgaaggagcctgaattagtctataatcgctttcaagtggccattgaagagggaaaggtcttggagtgtctggaaaattatgcaatcgaggtttcttatgcctacagtttaagtgagaggctgtatgaagttttgaaaagtgaaaggcaagttcagtatcatcaagctgtggttagatttatagtcacgcacattgacaaactcaaaacaaaagtgagggaccttttcttagaacaatcttccgacgaagatatctga

SEQ ID NO: 533 - DNA, 2127 bp, Apple latent spherical virus
  source 1..2127: mol_type = other DNA
ggacccgagcaaatgtatataccaactgctcgatctgaatcctttggatcagtctgtcttcttgggaaatggactggccctaagccttattttttagagaatagttctttaactccctctctaattcatgactgtatagatatagacatgacaacggagcctgctattctttctaagaaagatcccagacttcaatacactaacaataaagattttgatccttttctctcaggtatgggaaagtatgctgttgaggctcactcctttgatgaagatgaagaattgtttgaggatgctctagatcgagttttctcagagatacctatgtttacctgtgaagatttatctaatgatcaggtatgcaatggtatagaggacgatgattatgctgaaggattggttatgcagactgctgaaggttaccccttctgcactatgcggcccccaggagtcacaggaaagacgtggctttttgcgggatcaccaggtgattggcacatagtccccaattctcttcttgctaacgaacttaatgtcaaagagttgaaccttagcaagaatatttttgaaccagtgataggtatagattttcccaaggatgagaaagttgattcttctaaagtgtacataaaacaaaaaactcgactttttactatcctacctgttgattataatattttagttaggaaatattttctttcttttgtttcacaacttatggccctccataatgaagttcctacaaaggtaggtattgatccaatttctaatgaatggtctattctttgtcattctcttcactcaaaaggaaccaattggttcaacggagattattccagatttgatggaataacacctcgtaatgtgcttcagggcattgtgaagagaatttcgcgtagatatgctaacaagagttcttttgctataacagatcctacactttctatcaatggtgatcttgctagatcccttttgatggatatgtgtagcactcgatatgggctaactaatggggacctttggtatgtcacttctggtataccttcaggatttcccttaaccgttatagttaattctttagttaattctttctttgtgcactttgcttatatgaagcttcattcttctgaagtgcacaaggctttgtatcctctttattcttttagaacccttgtatcatatgctgtttatggggatgataatctaatttctgtacatgacacaattaaagatacttttaatttagttactatatctaacttattgttggagcatggtgtgactcttaagaatggagccgataaaaatgaggaaattttatctccattctatcctatagagaaggtggattttctcaagagacgattcaccactttacaaggacatattgttgctccacttaacactgttaatataactgagcgcttgcactgggttcgtaagggcctaggtgatgctgatgccacacttgagaactgtaaatcagctctctttgaagctttatttcatggagagctgtattacaatgatcttcgaggcaaaattgaaaaagcttgtaaagtgaagggccttcctttgatagtcccagattaccaagacgctctttctttatttttaactggaggctcatatgctaaggctattcaggctatagcgatgaatctccctgatagaatctctctgtacaaatctgaattctatagtgtacaaatatatcctcaaattttttatgtgaccaatgagagaaatgtcacacttcagaaattgctggagaccactactctccgtaacatttgttatgtttctaggaactacgagtctaggagcagttctaggggtcttttcactcttaagggtgaaggttggactccagctgctttgaaagctcgtcttagtgtgtacaaagctatggccaaacctgtttacttcgtagatgaggctaatgatggtttggctatgttttattgcttagattatgcttttcgtgtttgtggtttaacccggagtcaaattgcaaaaattcttaatgcagtttttggtggtaaccccgaagtctgccaaagaattttccaatttttctctcaagtcgagccaaccaataagtacattcctcccaatcaaaggagg

SEQ ID NO: 534 - DNA, 6588 bp, Soybean latent spherical virus
  source 1..6588: mol_type = other DNA
atgtctttccattgtccaagttctacttgccttggttacactcaatctttctctcgccgtgatatgcgagagcaaggggatcgttgtccccatgctatgtgtggtgctcttctagtgaagaaggtgcccactttatccccacagggtgccagacctgtggtatcaaagaccactgttgtggtccctcctcaagccactgaggaggttttgtattatgggtgtgcccccagacccgcttttcttgaagcggttttggcggccccaaaattaaagatggctccaccagtggtggatgcgatggaagtcgcatacctccgtggtgttgcagccatggaagctgaggagaagaaactcctcaggaaagaaaaggctgcagttgtggcccgtgctaaggcacggcgagctgcaaggaaggcagccaagaagcaagttgccgagatgaaggcaactgtggccctgaaattggccacaaggcaaaaaactgcacgtttgagtgcagctaagagggccatgaaggccaaaagaaaggcagccaaggaggctgccaggttggcgcttgaagagcgccgtgctgcgggtttaacccgcaaatcggccttcaggcgtagcctgaaaaagaaagccactaagatggctggtaggaaggtccctaagacctccacttccacctttcccaaggtggaatctttttcttgttttccttcttctcccctccctgcttttattagggaggaacagccctgggtggctgtgaataccccctgccctcatcctgagggcttcgatttggcggttgatcccgcctttgtggctcctattgtggggccaatcgttagtgtgccatttatggcacctgttgtgaaggcttttaatagccttgtagaaattttggcggctatcaattatgaggccgctgtagatttaagagcctacattttagaaatagcttcttacgaaaatttctttgctttacggagaatttttgttggaaaagctttatcttggatggctcttatcctacctctttatccctatgcgggcatctttgatacttatctcccacttgatatggtggaagataagaattgtgatgcttatttagcctcattacagcagactgcagtgatggtgctggaagtgacccagggaccaatggacgcacattctatctttgatatagtgcgttccgttggttctaaggttgctagcataaaggacaaggtagtgggatgtatagttgagaaatctgctgccctgttggacactgttatagacacagcaaagggcatgttttttggagttcttggcccataccttgcccgcgcacagaagatcggagaggaaattaaaaaattctgggataactgtgtcgagtgggcaacaaaattgtggcaaggagctcatatagcattacaagctcttggcatttatgctgtttgggctatagttgctatggtgcttgtaggagtaatgtatatattagaaacaattttgatttgtttaggtgtaatgagtggtcatggtgtccttgttgttgctttgacaggggcagtcatgacttttttaggttttactgtttttcagatggggcgtgagtatatacattttttgaccgccctacgtcaaatcattttcttagcagttattccccaaggaggattgactcaagttaatatcatggattcgtccgttgatgttactgagccacactccttgttagatactgctatggcaccagttcattttttggaaactgttgccagtggtttaacattcttttcttctacctctgttacagtcttaggtaaattaggaaattctctggagggaattcgcaaaggttttaattgcctacgcgattttacttccgttttgttagaacaatttggaaatgcttttgaatacatttccggtaagagaacgtctttcttccgtgatcttgcgtgtgcagttaaagtagatatcgctcgatggacccaggatgcacgggaaaccattgagtattttgaaatttcaggttcccttgataggtatgagtattatcgtgctcgtgagcttatctatcaaggtcaagatttgatcgacaccgccaacaaagctcgtagttcgcacacaagtgtaaaattcttgcgaactattggcaagttggttgaggaactaaaagaaattcgtgctaagtgtgcacgaagtttaaaattcccaggatggcgtcgacagcctttttgggtatattgttttggtgagagtcaatgtggcaaatctactttggcaaattatttgatgccattgttgatgtctcacatgggttgggatcctcaggatgtttacagcaaggatcccgttgatggttactggtccggatattatcagcagaagggtttaaagataaatgatttatctgctgttaattccaaagatgtagcgcccctcgagcagcagttgataccattgatatccactgaggagaaaatggtgtcttcggctgaaattgaaggaaaaggaatgcagtttgcctctgaaattgtagtttcttcatccaattttaatgatgcaccaactggtgctgaaattttggatgcagatgcttacagacagagacgaaaggttttgatgcgctgcagaagggctgctgagtgggttcataatgctgatggtacgcgcacagagaagcttgatgctgagggcaaaattgtatataagccctatgatccatccaatgctttatcttgtaccgaggtgcaatggattcatcctgtttcatttacagctcttcccggaccctgtgggcagtggcacttagccgagttcaccatacctatggtgaaggaggctatggatgcccactttttgcaagaagaaacaaagatggcatcctggaagtcgagccttggcatgaagagtcaaacagcaaggaaaatgggttcatacttgcaggatatgattaagggtattggtaattttgttacccttaaaggagcaaaagattcagatcctcgttatttgctggtagctgttgatggaaaatgctatgcgttagaccagcaagggaaagccactccttatgaggattgtgatgttgttgaagaaattgagcggctaactttgttgcaataccgctcttatttcgcggacttggtaatggaacatgctgacaatacatattatcaagattcattccattcatcaacagtccgagattttttgttggctctaatgaaagatgggtcaactgttttgtctgtggatagtctgggtagtagtactcaggacattcacaaagaattatgggcagaattgggactttcagaaaagatttttctgagggtttcacaaatagctcgtaatcaattgcgcgatgctccacattttaaggaagacgttgcgcacaattttttggaaactatgaggcatcttagggatgctattgtagatagaaaggaacaaattcttttattttttgcagcagtagctttagtgggcttgtttagttggggttttttgagcctaattaaacaatttgcttgtggttctttaggatttggtgctggcatcgcattgcgtgagcaaattgctcatagtagtgttatgtcttcaggtagtgtgactagtgcctttgttgcacgcaacatgccagttgtatggggcaaagctgctaggtatgccactgcacactcaagcaaagaagaagtgggcgccaattttgattattttgaagatgctagtgctcatttgttagctcgtgttgttggctcatctggtcagtctgagacctgccttttatttggtcatcaggctattgcactttgtgcgcaccagttgagattgtttcctgacaatgacagggtgactatccattatttttcaaaggagaggcgccctgtttgtttttcatttacttggcattatattaatgctattgagtggcctgactgtgaagtaattgtatatagagatgcacagctcacgccactccctgtatatagtgatgataattatttgtgtggggagcaaacattgcccacagttttaacgataactgggctctcaattaagaagaagaaattctttgatgattccacgttgtgcccaagcgaaaaaattctggacggtgaaatgcccatcgtccggagctggaaagataccgcttctctgagaacgcaagtccagacaattttgtccgagactcatagaagagatataaataggtattatacttctagttacccatcagggaaacatgatagtggaggtataataactgcagttataaatgggaagcgtaaagtgataggcatgcactgtgcgggggcgcaaaatgggaaaatttatgttagtaccattggtcttttgcccacccgcaacattaatgatgcacactctgctgccgattattttgttccaagtattggcagggaggaaaaaggattttgcaagattggttggattgcagatccttcaaagagaccacatgctgccactaagactgcattggcaccagttcctaaggaattggctttgccattgccagagggagtgtctgtaaagattccttctattttaagtgcagcagatccacgcctgcgtgatgaggtgaatcctgaatttaaggattatgatcctctacgcgtaggtatggataaatttgccaaccccatggatccgcttgatgatgaagttttacagcgggtctgtgaagatatttatgaaacctggtatgactgtttaccaatactagatgatgagaaggtcttcttgcaaaagacctccttggaggtggcgttgaacggtataccgggtgaggcttgctatgaagccatgaggttggatacatctgagggttatccttttgttttagaaaggaaaccaggggagagcggcaaactcagttatgtacatattgatgagaatggcgttcgttcccttattcctggtacatcggtttttagagattaccatgaattgtcagcaagtatactgacccaagtgcctgtgttgaattgcattgaatgtcctaaagatgagttgctaaaaccatctaaagttttggagaaaccaggcacacggcttttcgatgtactcccctttacacataatattcttttgagggagtattttttaaatttttgtgtttttctccaacaaaatagggtgcatttgccctgttctgttggtgttaatccatattctcgcgagtggacctggctttttgataggttggctgcgaagagtgataaagctttgaattgtgattatagtaaatttgatgggcttatatcacatcaagtctacatgcacatggttgcaaccattaaccgactctttagagatggtgaggaagcaaattgtgcgcgtaagaacttgtttttaatgtttacatcacgcaggagcatctgctatgatcaggtttatatggtcaaaggtggaatgccttctggatgcgcactcactgtaattattaattcaattttgaatgaaattttagtgcgctatgtctatagaataaccgtcccaatgccagccaaaaactattttaataaatacgttgaattggtggtatatggtgatgataatttaattgccatacatgatgatgtggtctctttttttgatgggcccattattaaggaaaaattggcagaggttggggtgaccattacggatggtactgataaatcatcacccaccttgttacgcaaaccgctggagtctcttgattttttgaagaggggctttaggaaaattgaagggggaatgtattcttgccctctggataaagggtccctttactcccggttatattacagtgctggaggtaaagggggcctttttcaacttgatatcctccacgataatgttaaatctttcttggaggaactgacgcatcatgctgatcattatgaagagtttcaaagagtgcgcagtttttatattaagcgtattccttcatggtcagctacgctgcctacctatgctacatgtctgaatatgatggaggggcagcggaattcagcaacaccctggcaaccacataaatttatagaaacgcggccttcaggttgcgaaactaaaatgatggcgggccaggataatcatgctcagaagatatgtgtaactgagcgtataattatatgtggtgaaaaatatacgccaccaatactggagacctcttttgttgtttcaatagacaaccccctttatattggtgaaaggggggagtatgttaaaacagagtttggttcaggtatggggcgactgcctactgatgcctggatcaaagctttctccagtcccaagaagcacccacagctttttgaagcttataagatgggtgctactatatattttagatcctgcatgccctatttaaatgcatggtgtgcagtgtgtaagtttgcattggctcatggaatcgatcagagttctattattgctatgtatgagtcatgcaaaccaagaggggcgggcgacattgctcctcttgtggccgtaaaggcatacactaaatttgtgaacagaccagtgtttaaatttaaagagactgttcataaggaagtgctcgaagcacacaatagtgtgcgagtcgcctaa

SEQ ID NO: 535 - DNA, 16404 bp, Grapevine leafroll-associated virus 7
  source 1..16404: mol_type = other DNA
gatttactactaagcatactgcaaacgtagtaattcttttaatcgtcatggcactcttgtgttcttgcttttaccttccttcaggttctagtacattaaagattaaacgttccataacatacttaaccaaacaattaaaacatcgttttggtataactcttcgacatacttctgattcttatatccgccatagtttgttgagagtacctgaacataaaaagttttatgtttccagacttattaagttagtaattagtatgaaggaggagttaaaatcccgcctttctgttaaaacttctgtggttactggtagagatagagtcttatgtctaataaaccaaaacaaaacaaaaacaattgttaaatatagagttaagttattacgaagtttctttaatttacctagatgttcctttaaatctatccccaaggaaataaaaagaaaatacaaaaactttactttaggtatgtttgatcttatttttaacaatttgcatgaccaccacctaggtggttctagattggatagctcctcatcgaaatccaagtctgacattattcatttgaataatgagggaaagaatttcgcagtcaatttctccttcagcgacatcagtagtcaaggttcattgactctcactataattgtctcgtctgctgaaaaacatagatacaatttcaacatcaagagatatatctctagatgtggaaattactgccattatagggcctctttaaacaacagcaatgttaaagaggttcaggaaatcttcttacgccccatcaatctctttcaccccaccaacggtctctcgttatgcttgaccacagctgttatgcaaatgttcaacgagaataggggtttggggcgtatcattggaatttttccatcacagaggttcttgaatatgtattccactgtaaaccggttttgcgtggattacataaagcgggtggcgagtgtcgggaaagaaagaacacccatacagacttcaaatcctaagggtaatcgtacaaattcttcaacaaccattcgtggttacgtgaagaaatctgtactcaatgatttcaaccactctaaacttgagagcggtggtgtcttcattcctaagaaggagatacactacctcaaaccaaatactaagagtggagaggttgtgcgcgggggtgagaaggtagttgacaaacaaaactcagtatccaaaactacaccactcccgtcatctaccattctctttggtacgatgacttcagatgttgttaaacaatctgtgcagtctgtagttggtaaaactggtggaaccactgaaattaagggagatcgtgttatactttcacgcaaatatttagacccaaaaatttttgtccaaaagatggtcgttaaaggggttgttgaaaaatacttgataaccaagcccgacggcagtaagactgagataataaacaataaggatgccgtcagaaatctttttaacaccacatttaatggtcagagatatttcgttgacgacgatgctttgacaccctctggtaaaaaattttcatctgtaaaaatcggttattgttggttagatgccttcaacctctcaaagaaggcaataccagactggttggtgccattaccatttattccgctgtatttaattttcaagtgtggtgttcctaaaaccattcttcgtatgattagaaggacggggaatggagtatgccattttgatagaaggtatgcacatgctcattcaatcgcaaagatgactgatttgcttggagccacaaatacactaagtcccctggggatgggtaccaatgagtatgaagtcggtctagattgtttggttgagcgtgttatgaagaagttaacacctcgtggggatttagacactgtgacgcagttgtttaacgcagcggcgaatcgttttgacgactggtacaaacgaggtgatgatgttgttgttaagacatatgtcactggagcagataagaagataatctctgatctcttcccagatttaaaaataaaatatgaagggacgacaaactcttcccacccgttgttcacagtcattagacaacttgaaaattatctgatgtttcgtataaacaatttcaaaaacttttctgactttggcggcaatattctgacccacatttctatgggagttaaaaattctcatgtttgtgcacctctctgtgatgttaaagatgtcaacagacgggtgaagttgtattgtaacatctccaaggagatacacagtatgtctgacaacgccatgtgtaccaacaaggcccaggactgcaatcacaactcaaaaaccgcagtgatggtggaggtttatgatatgtcgatttatgaggtggcacgtagtatgctcaaacgagaaattattaaagtcgacgcctccatgcttctaccgggtgaacttctagaggacttcgatgttgtcgatctttttgataaacgttgcatcataacgaaggttggggaaaaggtgcaataccgctatggtgtaaatggtgaagtgtatgaacacgatcttaaaccattgaaagaatggatgtctgttggattcttttctgtcgatggagtgttgttcaagaaaacactagaaaactctagaggcccatttcaacactattcaattgtcgttgttgaggatgtacaggccaaaacactggtggttgaaacgcagtatcagacaaacagcaataatatggtcgaaattgtgatacccacaatcaattctgacggagtggtttcaaaggagaaattgagagtggataaatcttttttgacacacctgcttgagtacgctagtaactgcgttgaaactttcaaccgcaaatccttcgagcatttgatgagtcaatataggtctcgtaaggggtttgtagtgtacaacaacaaggtcattcaagaaagtgtacatatcccacacagattattggatggttttcttgcggttgtttgggcacatggtatgcgaatggctgaaaggtctagatatttagcaaaaatggtgtacgattcatactacaccccttccatatttcaattgctaaagcgtgcctttgaaattaaatttaaaagatttaaactttgtgtatatgaaaacatcctgaaactgttgagatatattctcggtggttgggtttgtgacgacatgggcacgattgaaggcaggatagtggaactaaatagggtcataaccgtgagacacacgctgcacgtgacttgcaaaaaccaaccaacaagtgagtttcaagaaatattcaacagttatgttgaggaaagtaatgacttcattgagaaattgagtgagagattgaagacgacaacatccaatgacgatgttttggaatcgggcggtggtgatgcctattggaaaacgtataagagaattcttgagcaagtcgcgaagttcaagagttactttaaggacgtgatatttttgacaaatgtgatttttgacatttatgtttctagtaagatgaaaatgcattatcaggttgtcaatcaatgggtctccactttaccacgtcggatgtttgaggaatggaaatcaataatatcccaatttactcttacgggttgtgctaataaggttttgaaatttatattcaatttgaagtcaaatttcagttcaatatggaacggttttcttctctcaattaataaaattggtttgaaggttaaaaatttattgaatggtgaaagcttcaacagatttctcgggaaagataatctgatgttgtctatgaacaatgtcttggaacaatacacattgattcaaaatgcaattgaagttttgagaagtagtggggtgagtgatgaagtcatagaaaattctgattacagtcaaattatgattctatacacccactttatgcatgagaaatatgagaggaagaatgaggagaccgtcgaagaatttagtgaatttgaagacgtgttgcttagtggtggtgggagtagactttctctatcacaattcggttgcaaacttgaagaaaagattaaagaatatatttgtctttttcatcgtttgtctaaaataaccaagaatgccaagtacactaaattaatattgaaagttgtgtacaaattggtttgtggcgtgttaaaagcactcggttttagggttcaagatgtttttgagacgttcttgtctatacacaatgattttgtaacattctttgacgaaaacaatgtctgtctagacattggtcttcataaagtgaataaacaaataaaaaatggatgtggatatttcacgacccttagcaataaagtaagggagaggattgatggttttccaacatcgtgttctcttaatcttcaaactaagttggctgaatttaaggagagattggccgaacaactcttcttttttggaaattgggtgactaaacaagatggtgatgagtcagatgatgattttttcgattgtttggagtcggggggaggttcaaatcatatatatgtgattctttttgaaagagtacgcagatttctgtcggtttttctaacaaatttttccatttacaagaaaactttgtttctcgaattgggaaatgttaagtgtctatttagattgtttcaaaactcatctatcgaaaatttcacactcctaaggagctggtttttcaacagattacaatcggttaaggataatggtagtgaaattgtgtgtaaaggtgaaaagttcctttgcgactactaccgttatttgcaagaatcagatttgttccgctttacgattaatgttgcagcacagcttcctttccatgttttgaattgtgttttgagtgccggaaatccacttccaatcttatgtgaatgggttggttcgattgttatatctttttacggtcgacttaagtttgttaaggatgatatttttgtaaattggattggttgtttacttctgacaccaatgactctcagtgtgatgtcaccaatgactttactttcgacattgatggtgctgaagaccatacttctcacaaagtcgatgaaattccaacggttgagagacagtgttgtggactattatgcttccttgaatcttgaccttatacacagtgtgatgaacaatgattacgcttccaaagtagctttaattgttgtgcttccattgtctttattcatgggaagtagtttgttttttgccattatcaacgcagttgttgtctataaatattatcattatcatcaccattgcgttttggtgtcaaatgtatccattgcctcaaaaatcgacttccaagatttggaaattgatgggaggttgaagagggcgtgtattgaaattaacaagaggaaatttaagaatgataatatcaaaacaacaaatgatgcgattgagaatgaatctgacacacacaaggtggggggggagcagtcacactttgatggtgtggcagattcgagaggtcattccgaaattcattcacccaatgattcagatggtgaggagagaggatgttcagaagacaatttgcagaaatacaactatgttagagagaagctgcagattgagagaagtgatagaatggaaagtggtaagattagtagtgagaagaatcccgctttgtgtctgatgtataacaattacccttcttcatcatacatcacttttaaacaaacaaaaaatgatttaattaactcaataaatgagatgtattttattgagaatcagactgcattgttgaacattggtaaaatggaacacactattaataagtacaatcttggatatactgatgagaagaagctgtgttccattgtcaatgattccaatatctatatgtggacaaagtttcgagggtgggtaagtcttgggaacaacagttctacagaggagatcgaccctaaattcatatttttaaagaataagaaaattgtggataagataccaaatgactgtgatgtcgcttttacaacaaatgagttggtcgttgggtattcgaacgagaagttgaagaacatagaaaaagatggtatcttcggaattcaactacctatcgttgatgacaaggttttggttcctaaagttgatgctattgtcaaaagtgcctccttggtgaataaacctcctggtagtggtaaaactactgagatagtaaggaaggcaacaacgttggcgaagatgcgcaatgatgttttgattttaagtgttactagaggtggaaaggacgagatactagataaattgtctcagtcagaatttgtaaacggttcaataacagtcagaactatagatagcttcatcatcaataatgctaataagaaatttgattgtgtgtttgttgatgagtgctttatggctcacgggggacttgtcctttatgccttatgcaaactaaactgtgataatataacattatatggtgatatcaatcaaataccttatatctgtcgacttccacatttccactgtagattttctgagactctctacagattggtaacaacaacgtttgacaacgtcagttataggtgtcctgctgacgtatgctatcttttaagttctgaacgtgatgggagagggaacttaatttacccaaatggtgtgaaagcgatgaaaaatgaaaaggtaagaacgatgaatttggtacccatcaaaggtattaattcgattcccgttgacgtatcgaaggatgttgcttacattaccttcacacagcatgagaaacatgaattgaatagatatctcaacacaaatactgtgaaaaccgtaaacgaaatacaagggcacacggttaaaaacgtgaatttggtaagaatgcgtgttcatgctaacgaaatctatagtgacagaaatcagtttataacagcgatttctagacacacagaaactttcaactactactatgcttcaaacgctactaaggataaggtgatgaatgctgtcggtagtttgaacactatcgaggattacgttctagcaaatttttgtttcaaacagtgcgtttgacatttatgaactctgttgtgatcgagtgaattttcccacaatttcatctcgaccaagtttgagcaacgtctattcagtgaatgagtatatgaacttagtattcccaactcaaagtgcatatgattttattcacaggactttgtcattcgaacagacggacttcgacatcccagtattggacaatgctaaagtctcgatgtcaagttcgaaggattatgttgggaagacttataaattaccattattatgtggtaaaggagaaagggcgagaccaaatacctggagacaagtgctgatctctttgtcacatcgaaattttgctgcccctcaaatcaatgaagaacatgaccaggaattcacatcaagtgttctttttgaaagtcttatgaattgcatgaaacttgagaagatttcagaatgtttcgatgttgtggagccgtgtttaaataagattgatatgtggttaacgactagagatagtcgaagatttaaaggaattttaaataacctttcatatgatgtttgggtcgaacaagtaacaaatttaaaactaatggttaaaggagacatgaaaccgaaattggatgagtcccattatgacaaatatgcacctccgtccaacattgtttattatcagcagatgataaatatgtttttcagtcctgtgtttttggaaataatgggtaggataaaatattgtcttaaggacaacattgtgttatatggtggaatgaatctgtctgaactaggttctgttataaaaagcaaattaactgatccattaccatcctataactacactgagcttgatttttccaaatttgataaatctcaaggatcaataattaaaatgtatgaagaaatggtttataaattctttaaattttctccaaacacatatgacaatttcaaactgtctgaatatttttgccaagcctcctcaaattgtggggtgaaagttgacttattttctagtagaagaactggaagcccaaacacctggttgtccaacaccttgtgtacattggctattctatctgccacataccaattggaggactatgatttaatcttagtcagtggggatgattctttgttagtgtctaaaaatcctgttctgaataaagcgtatgaaatcaacaaaaactttggtatggagtgtaagttcatggaacatccctgtccttacttctgctcaaagtttttagttgaggtggatgataattgcgttattatgccggatcttgttaaagtctttgaaaggtggagtaatcccatccctaccgacatgatggaaaacgatggggtcttgaaagaaagatttacttcctataaagatcttcttcaaggttacttcaatgacaacattagttttcatctcgatatactcctttcaaaacgttatttccaccctgaaggtgcttcttacgcagctttctgttttatacacgtggttttatctaactttaggaattttaaagaaatttttgatacgtcaagtgaagttattatataaatgggcattctttacgaaatttgtgtttatttacttgtttgtgcatatattattttaaaacgaccttccgaggacgaattgacattttttaaaagaaaggacaaataacgaaatggtggatttgggtctagattttggttctacttttagtaccgtatcagctttaatcgatgacaaatttgttgaattaaatatgaatgggtcaccatacatcccaacggagatggcaatttatgatgataaattccttgtcataggttctgccgcgaaacttgttcatctcaagtcagacagatatactatttactatgatttgaaacgttgggtcggtgtgaattctttgaattttgaaagaataagagacaaattaaaacctaaatacaatacaatatttcaggacaacgactgttggatggatggaatcggtactgtaaggaagtttttaccagttaaatccttgatttactactatataaagaacttagttgagcttttctgcaaagtcaaatctatacaacctggaagactcaacatttctgtaccggccgattattcaaatttgcaaagaggttatcagaaatctctcttgaaggagataggtttttctgtcaaccaaattgtgaatgaacctagtgccgccgcaatatactcattctttacgaatccagataaggaagatattttgatgtacgattttggtggtggaacttttgacgtctcatacgtcaagatcctaaacggtataatgtcggtcattgacacttctggggatctgtatttgggtggtagagatatagatgatcagttgggtaggtatttaaccaacaaatcagggaaggtttttacaccatttattttggcaaaaataaaattggatgtttctgaagataataaatccgtgttcgatctccccgatgagaataatgagtcagtaagatttgactttaattccagtgaattgaatgaaattgttaggccattttcggaacgttcgttgaaacttttggacgatgtggtggtcagaaataatattcgatcatgttgtattgtgatggtgggaggatcgtcgttgctaagtaatgtgtataatatggtcaacgaatacgcgtctaaacactccttttccgtggttcgcgataaaaatttgcgactcagtgtttcttacggttgtgcctgcttgtttcaactgcaaaagtcgaataacttcacttatatagatgtaaattcacatcctttatatgatgttgatttcgattttctaccggagatcgttattaggaaaccgatgccgattccttatactcatagtgttaaaaaagcaaacaatacaactatacaaacaggaattaatgtttttgagggagataaaccattcctacttgacgcttatgtgttagtaaagtcgacgtttttcaccgactctgtatctcgacctggggaaggttactatttgaattataggtattctgtcgatggtgatatttctgtggacattacgtcaagcgatggaaaagtaaagaaaacgttcgaaaattcagtgattcaagagtttaaattgaacaagttggatttgattcaaacccaaataggaattggttctgagatagttgtacttgtagatttattaaaatattactcgactgacgaagacataaaacacttggatactaaacacccttttctactggatgccgcagttgagaaactcggcggaatcggtgaaatttctagacgacttagggatcacttgccgtttgtttgaggaagttaaacgagaggaattgcaaatcactctttgcttgtcactttcacttaacggtgaattaaaattactatatttatcaaacaacagaacattcagtgggagacttttcatttgtttctgggacacgggaatacaaggtttagaacatttgattgaagagttcccatacgtcagagagcaatggatgtgttgaaatcaaaacaattttacagatgcttctcaacgttgatgatgagaagcaacattgatgatgtactggttaattttaaaactcatattggcagtttaggtcaatcaacattaaatctaaattacaatggtgtgagtggtccaaataaaaggaaattttcgtctatttttgaagttagtggtgaaactttgattaagccgactattgatgatgtagacgtgttaactttgttcatttactacttaaaagtggtggaaaaggacaaatacaaccaatgttgcccataccctccagaaaatttattagtattacgagaaaaaatatccgagttgaaaaagaatcagtcctatattgacaaaacagtaacacaaatatgtgatgaagatgataagttgggatgtaaattccctatgtcattggtgaagtcagaactcgatggagagagtttgaattatcaactacttagttacaaattttggaattctttaggagaaaagaaggatttgaggtcgatatctaaatccgatttaaatatctttaaggtgatgcgagatgtttcatctccagatactagagaaaaatcgcaatctgaatgcatcaaagctgctataaattatgttgacttttactatgaaattcttgaagatcagttgtttcagtcagtgttattgtcaaaacaaaaatttctttatggattacgatcatgtttgcaagatgaagtgttgaatttattcaattctagcgtgatctgtaagggtgctgaaatgtgtttacttaatatttacaaatactttaaaatgacagatgtgaatttgaaaaattttttggttctgtataatcttgaattcgcaccagtgttggaaaaattatttaagagagacatgaaagctagattatcagaattaatcgaaaagagtgtggtagacacgagcatggttttgaatgatatcgatttgttgaaaatacaattagatcgactgaataatgatgtggcaatacgttcttcaccttataatttgtcgaaaatttcagataaaatcatatttgatagaatatgtaaatggtttgaaatggaaaacatgatacaagataaaaatttaatagaagccgtaacacttatgtttttctcttatttatccacttcaccaaatataagatctagagatgagagatttcaaatgtcatttacatacaattctaagaggtataatatagacatagatagtaaaaagtttttgtcgtggatagatgggtgcaagaatcagctatctgagggagataggaatagaaattacgtaagaattttttgcgcacatagggcgaacaaagcgattagaataaatgaactcttcaattttacacctcgattgttctcaaatcttattgatgtaccaaatcacattcgtatagatttttataagggtttagatcatactaaactgactaagcaagagttaatcggattggaaaagattcgtagtgtgactgaatatcgaagtaaaaatgacgaacattcgaggcaaaggtatgcggattttgtgttttctgaatatttagattaaccaattcaactaaacgtgaaaactttggttatttttatagaacaatggaaaatatagttaaaaattttgaggaaataaagaaaattgttacaaaaaatgttggaaataggacgcaaagtgaaattactacgctagacaaatttaagacaaacctagtgaattacaccgagaagtctgatgaaataccatccaatgtcaaaacggaattgcttaaatataaagacatggaagggttagacatagagacttccaataggttgaaagagttcgttttaaagttagaagtgagacagccccaaggaaatgaaagcaatgttgcgagctcctcaatctttgacgatctggaagtaccaactaacattgtgattcacacacaagcagccaatgaaatgacaccatcgcagtgtgaagaattcgctaaagtattaaatgaatttatcaaaaagtttatgtttaaactaccaaccgagtcgaagttgacaaagaaacagttaaccacgggtatgtatgctttctttaccgctgcaaatgagcagtcgacttctaaggggaatggtagtaacaagaatctatcgaataatttcacattagacggtgtggagtatgaatggaatttctcacatgctttcccattctttgatgaagcatttatcaaagaaaaaattcaaaaccctattaggagatacatgcgtgccaagtcacaagagatagacaagcttctaatcaccatgggttatgttccttctggcaggttggcagctcaatggggtgttgtagacggattaagagatatgataggagatgcagtaccactatataagaaggccatgactgcagatcagttcacttctcaacttgcggcaacagagcaagccacgaataagaagggacaggctagtaatgtggtgcacgtatcacaagtacttggacgtacattaaacaggagatagtattatttaaatggaatttacactgacggaaagattgccaggtggggtgagtttcaaattaccaatcgctggtaacatcaaacaattattgtgcgatgtacaatttgaaataacacttgggaaagacaatggatatttcaagtggacatgtgattttaatgataatagtggctacagattggatttaaacatattgttatactcaaaaatctacagtgggtttaatgttccgattccaaattacacraagaagattagtgattttgtagtgtttgagactaaagagaataagtttgatttagagatcagatattttggaaggtattacaatacaattgcaaatgggaggtctttacatgaatgttacgatgtttgttactcttatccgttaacaatcaaggttacaccaaaaaggtctttagaagacttgagtgcacttaaaaatttgttcggttcttctatatgcccatgggaatctaaagtgagtctcgataaaaatttaaagttggaagacactgtcttcaaacgaatcggtggttatgaggaaagatattgtacgcttaaaactttcaccgactcaatatataccaacagttcctttgcttcccaattgttaacattaaactcaaatgttgacaaatcattgattttaggaaagtttgtcagattgataatgaagtttgatattaatgtatcgcaacctcttaatgtgttatttagggaagatatgatgtttgaaaaaatagagaacatgtttgaaattctcacgaagtccacgtcaggtgattacgaaagtttgataactttcaaatacaaatttcgtgaaggttttgtaattataaaaacacctaacaagtttagatcgaaaactaacatatacggaaaggtgatggaaactggccataaaacaccagtgttcaacttaactttaaatgagggcggacaattgatgttgtgtactttaaaagtcataaacgtatatgaactgggtttagatgtgaatgagttgttgatcaaagtgtcaacagattttttaaatgatcttgaagcgacaactgtgtgcaatgggttaccttttgcagatttctttaagttgagtaataccgcaaaagtgttcatcgattcgaatagtgaatacccgtactatgtagttacacatgctaacgctggaaacaaaagatctgatgatatccataaattcatttcaaaagaagtgagaaaaatctcgatggaaacatatagctctctagtaaataatgatgaatctagcaccttgattgagattacaccggataaattggaaagtgatgcaagaccggtagagcctctgaagaaaactacccctgaatggtgtgaagatatattacatataatcgaattgagatataatgtgtctgatgctttggacttggttctcgcttcttccattcttaatggaacaagtaaggaagctataaggaataaattcaatataacaaatgcaaagattggggataagtgggtgcagtgtgatcactcttggattacgagtctgttttttcacaaagatccaaaaagaaatttattgcggagactttgccgcttaaactcactttactgtttgagaaggacacaagaagggtttttccagtgtaacacgaagtttgctttgaagtgtggtgttacaattaattttgaatatttagcatttgattttttagatccgaaagagatacatagtataactcaggaggaggctgttgaagtgacaaggatactgaatagaaatcaggtaatcaaattcgaagtagttaatggatttagaaacacgaaacgataacacaatgttccgcgaaagggataagtgcaagatcttttcgtgtataatagataaaatatcgagtgcattgaatgtgcttagttcgacaagtagttcgactgtgtcgaaacagcaagcattatcagacatatctttaagtaaggatatactaaagaaacttggtctatttgctgcaccggtattaacacaaggtcatacagggtttttgaccgaatcttgtggggtaccactcgaattcttagatgaggttgggagagatttgttggtgagtgtaaatgttgaagacgtaatagaattttgtgattctatactggttctgaaaccactggtgagtaaacgaaccaattcggaattgattggagagtctgtaataaacgaactgatgaatatgtttggttttggtgatagggtgtcaaaaatacgtgcagcctttatgaatctagtaataagagagagtgaaatatacaaacacggaaaggttagattggtgatggatgaaccaatattgaagaagcttatcgctgaaatcagaggttctatattatgtaattcaaacaagagaagggagctgttggaattattgaataagaaaactttgataatatactcttattacaatagcgtatttggtgatgtttacgttgtgatatagttcgcatctacaagtcaatttatactgtgatgaacggtttattttaaaattgggacttagatatttgtattttgagattgaaaagataatggataagtttggatgcttcaattattgctggaatgttctgacacacatttgcacgatgacatacttttcagtaagtgaaattatagacaatatccagacaatcgatgattttattattccgatgaccaatttgatcactaacactgatctggaaaactatcgggtcaacgagtttgcgacaaggttgatttctgatggttgggaaagcatctcagattgtgctatgtatgttagaagccgcccggttgacgagttaaaagatgcaagtgagtatgtgttgaataaattaactgaatgtattgatttaaataattatttaaaaatagtgccattaaaaatggagagttttttagtagagagaattaatagcaaatcgaaatttatagactccacatctgccgtgaagagggaggtccttggatttgatcgctcgcacgatgaggtatccacttcatccattagatatttgaataatctgtatgtagaagagataatccgaagatacagaatattggcgggaaagagattcgcaaatctaaacgaatgtaaacagtcaaaagaattcaaatctcttttcagtttgttgtcagacatgactacattagatttcgcatttagaaatgtgaaggttaaaagttggtatgttccaacaactggttcgatgagagtagaaactttcatcaataaataagtaaataaaggcatttttgattaaagttattgccttttagtctaccactgtgataagcacaagtgtggttgtaaatctagaatttaaatggaataatattataaataatacatatagtaatttacaatatttaaacgtcctaaagttgtcttcgacacaccttggacgttcatttaaaaaataaactaggtc

SEQ ID NO: 536 - DNA, 2898 bp, Spring beauty latent virus
  source 1..2898: mol_type = other DNA
gtaaaatctgaggatcgaggttcaattccttgacgacctttggtgttatcgattgtttgaacaaatcaatcttttaaactttttataacctttattaatatgtctaagccatacgttcctgatttcgaatatcagatccctagtttccaatggctgattgatgactctttgaagagagagccagaagtcgcccttgatgtagaaacgggaatggacgttaataaagtttacctacctgaatccggatttgtagcggatggctcattagctagctatatcctagctgttcaacctgttgttaagggtgagggttcttttgaaccaccttttgaccaggcgcgctggggtgtgtgctgcgaacatgccgcgagtgctgctgagatttttacagaccgtcatttgttaccaacggctgagattgctaggatgttgtatttagacattccaggcagtttcattgatgaatctgaagaagatgattgggtcgttgaagatactactgacgggtatggtgagtatcggcactctgatgaagacgctatacaatcgccgcttttctccgcggagttaacgcaagaaattgctgaggagaagccatcactctcaatggatttaactgatgaaaatcatgatgagaggcagctgtctagtggccctagtgagctgacactaggagaccgatacgttgtgacaaatgaagagtttaaaatattggattctgattatggcgttactcttaatttgttaaaccctgttgagaatagggttgggcttgtagaagatacattgcctacgttagacagcgactcttttaaggagggcccgaaataccttgaaagagtttctttgccccgtttggaggcagccggtcatacgatccttcccactcatgcttattttgatgatagcttttatcaggctatagaagagaatagtgacatgtctcttgattttaatcgtatcaatttaaagcagagtgatgttgactggtatagggatccggataaatattttgaaccacacctgaatataggatcctttcagcgtagggtcggaactcaaaagactgtgttaaccgctctgaaaaagagaaatgccgatgtgcccgagatgggcgatgttgttgacattaagtctgttgccgctgacgttgccagaactttcttgaaaacgttcctgaataaggacgggaaagattgtttactggctagtatggacgttttagctaagggtctcgattatcataataaatggaagacccaccgggatttacagggagttacattgtgtactgagcagaatttgcagcgctatcaacacatgataaaaactgatattaaacctgtcgtgactgacaccctgcatatagaacgggccatagctgctacaattacctttcatggtaagggtgtcactagctgtttctcaccattcttcacggcgtgttttgagaagttctccctggcgctgaagaagcgctttatagtacccatagggaaaatctcctccctagaactgaaaaatatcgggctgaataataagtggtttcttgaagccgacctcagcaagttcgataaatctcaaggtgaattacatcttgaatttcagagagagatattgttgtcgctggggtttcctgccccgttaactaattggtggtctgattttcatcggtcgtcgtatttatcggacccgcatgctaaagtttcaatgccagtttcctttcagagacgtactggcgatgccttcacttatttcgggaatactcttgtcacaatggctatgattgcttataccgttgatctgtcggaagcaactgccatattctctggagatgactccctcattatttctgataagaaacttgagttggatactgaagtcttctcttctctgtttaatatggaaattaaggttatggaccctagtgttccttatatttgtagtaagtttcttgttgaaactgaaaatgggaacctggtgtctattcctgatcctttgagagaattacagaggatggctaagaggaaaattttaaaagataaagaaatgcttaaagcgcactttacgtcattttgtgatcgtatgaaatttatagagcatattaatgagaaatcaatagagatgctctgtaagtttgtttctttgaaatataagaaatctatagattatgacgttagagttgccttagcagcatttagttattattccgaaaatttcttaaggttttctgaatgttatgtcacagaaggcagtaatgtctttttgaagaaagaccctataagaaatgttttaggtgaggaagaacccgactatcatgataaagattcgtcttggtttagagattggcgtaatactagtttcaaaccgtctcgattattgaataaactgggtctttattctgttgaagatccgttgaaaaatgttaagtctgatagaagggttatggaaaaatgcatgaatacttccctcaaattggcctatgataatcggtcgttacagcgcatgaggttgaagttggattatttaaaagacgggattggtgatattaattccgttgaggtgttgaaaaacacctttgtgggcaggacttaagccgtgaggctttaaatctgaagtcggaggactttaatcttaagattagtcatctttaatagactggttagaactatttccttaaatagtagagtcattggtctaagcaatgggttttaatcgatcccataatcgatagtcgtgattttcacgcagagatcttacaagatttctaggcgcctttgaggattctccttgtcctcttcggaaggaactttgttccgtgcagtttactacatagtagtattttgactgcgggtgtcgttgatcactttcgtgatcaattggtttcaaaggagacca

SEQ ID NO: 537 - DNA, 1817 bp, Ageratum latent virus
  source 1..1817: mol_type = other DNA
gtattgtatatcgaatcagattaccacctccatatggataaaactaaatcagatatcatagttttcttcttgagtaaccgactgaaggtgttccagtcgttcgacatcgaacaagacgattacaatgattgggtaaaattgttcttgttcaaattcatcgtcgagcatactgctcgttacgattttgccactatacatcaaacttttgtgatggttatggggaacctcggaattgttaacgatgaagagatcgaagacgaagatgatggctatgtccacgatatagatcctttttatcttccttatgacgatctcgacgttgattacacttccatccgctgtgagattagtgatgatgttgctcccgatcttccacaagtatctgacttggagaattacgttgaaaatgtcagtcacatccctgaaggtacatcatgggctagtgtgtctgacacattggaagaattcagagaagagtatcaggatttaaaaaccgattctgtttcctttgaaattcccgagacgtcagttctcaattgtgatgatgacgatggtcaactttttgacctcgaattgatcgatgccggtgagtctttggctcccgaagtttctgctgatgctgatattaggaaatccgtgtttatttcctatcaaaccggttcaaatctttcgtctaagtggagacctaagattgttcaggttagaccagatccatctgtaattcaaaatgcagttgacgagttatacccgaatcatttcagtgttgatgaccgattctttcaagagtgggtcgaaacacatgatattgatttggaagtttccaactgcaatcttgacatgtccacgtttaacgactggacaaagggtgttgacactcgtttgtctccacacctacaggttggtgggttatcacatcgtgtactgactcagagggaagcgttaatagccataaagaaacgcaacatgaatgttcctgagttgcaaagccaatttgatcatgacaaagtgctgaatgactgtgttcagagatttctcacacatgttattgataagaccagattgtcaaaattgatgccgatatctggtgaagagttattttacttcaaccagtatgtcgagaataaaaatcctccactttcagaatatcgtggaccaattcccttggccgctcttgataggtacatgcacatgatcaagacgaccttgaagcctgtggaagaagattctcttcacgttgaaagacccatacctgccaccattacatatcataagaaaggcgtggtcatgatgacttcaccctactttttatgtgcaatggtgagattattatacgtgttgaagagtaagtttacgattcccacaggtaaataccaccaaattttccagatgtgcccccaacgtctgaagaactccagtttctttaaggagatcgatttttcgaaattcgacaagtcacagggtcatttacaccatgatatacaacagaaattgtttatgtatcttggtatgcctcaacatgtgattgatacgtggttcaatgcccacgaagtcagtcacatatatgaccagaattgtggaataggtttttccgttgatttccaaagaagaacaggtgatgcgtgcacttacttaggaaacactcttgttacgttgagtgtcctgagttatgtatatgacctcagtaaaccgaatattctattcgtcaccgctagtggagatgatagtttgataggttctttaactgagttgcccagagatagagaggatttgtgtgtttccctctttaactttgagacgaaatttcckcayaatcaacc

SEQ ID NO: 538 - DNA, 2761 bp, Ageratum latent virus
  source 1..2761: mol_type = other DNA
ggaaaacaacctccgttatggataaacaaatcaattttacctcacccgctaccttacgttctaatgtcccggctattgatatcaataacttgattaaaagttatattgaacatgtcaaagctgatgagattacgaatgtgggacggtttttgggtgatgttgccttgcgtgaaatcaaatctcaagttgacatctcaaatggtgacttccagaagttgaatgtcggtttccgactgactcctgatgaaaagaatgctttgaaatctagctttccaggcctcgagatagttttcaaagattcttgtcaatcctcacatagttttgctgccgcacacagggtgtgtgagaccttggatatatataagcgcttcaacacaaaaaccgagaagatcattgacctcggtggaaattatgtcactcatgccaagcatgggagagcaaatgttcattcttgctgtcctattcttgatgttcgcgatggggctcgacatactgatagatatatatccttagctgccgctgtggagaaacatcataaggaacttcctgttgatttttgttgccacaagttcgaagattgcggtgttcaagcaccgtatgccatggcgattcattctataagcgatattcctattgccactgttgcaaaacattgtgtgcgtagaggtgttcgaaagcttatagcttcggttatgatggatccatccatgatgctttatgagcgtggtcatatacctttactcaatgttgaatgggaaaaagaagacgttgaggatcagaacggtgtcaaaacgctgatccattttcattttgtggatgctccaggtttgagttattctcatgacttttccatactgtcacaatatatggtcaccaatcaggtcatagttggtagtggatactcttatagagttgaacgaacagctgacttgaacggtgtcttcattgttgagatgacacttagtatgacggatgggatgactctcaaccacatgaaacagctgactgatatttcttgtgcgtggttgtcaaagttaaggaagaaagtcttcgttaaactggcygtgccagtttcaaccgagtggttcactgaagattttgaaattcggtgggcgctcatggatgagtctcttgtgagatatgtgaccgaagctgcattccggcaattttctgrgagcaaagatgcgaagactattgtgcaatacattgccacgatgttatcctcttcctcaaatcatgtcgttataaatggtattaccatgcgtagcggcagtccgattgagattgatgagtatgttccgttggccgttaccttttacacaatggcagcctggagatacaaaatgattacccctggaattgatgccgtgacgacgagagcgcgtaagaacatagattatttgaaggatacaggtggtgaaactttgtctgatttattagtcgaagttcaacaatctgttttaccaaatgatgattytggtctgaagaattttgagaaaataccagacatcatcaaatctgtgggtcttagagctattaagggaaaatctgtcacgaagatcggggatgataaaacccttttgaaatcccacagtattttcaaggaagtgctctacgagattaagcagttctttggtcttactgtaactggatcagattttaattttgttgaaggaacaccagcaaatttgaagtctacagttgtttggaaagttttcgagaagaacatcaactttccctcatgtttagacgtgtctgaatgttcgtacaatttgatgaacaaacatcttgcacagraagcgtccgatgaggagaatgatcggaaacaaaaagatttcaaggatgccagagacaaagctctgattacgatcgccaaggtacttgagaagtcagacgtacccgatggattgcttccaattcttgatctttgtgatgtaaagcaagaattgatgaccgcccagaattccctgagtttgactccggaggccataaacacgactgcagcttgcgccagtagctccactactgtgaatccctatgccgaaagtatcaaagaagctattcattacttcaatgaactcgagatggtaaacgcaagaaatcttaaagctttaggtggttacatcggttggaaatccgccgaagtacaaacatatcgagctttgaggggcaggaatgaatcagtcaaagtgtttataccgtttgaaaacaaatggtatccggatgacaagggtctaaccacttacgaaagggcaatgtcggaagatggttatgttactcttcattgggatgttgatggaaaatcccttaccgatcgatgtaagaaatctgttagcaggtttaatgcattagtggtcgacgaatcttgtattttcaattcaggccagcgaatgatacccgctctggaatccgctttgaaattgaaaccagtgtttaaggtgactatagttgacggcgttgcgggttgtggtaagacgacccacttgaaacgtgtttcacggttcgacgctaatccagatcttgtcctaaccagtaatcgaagttctgccgatgaattgaaggacacgttagactgtaatgaagcgatgaaataccgcatcagaacagtcgatagttaccttatgttgaagaactggttttctgccgataggttgttattcgatgaatgcttcttgacgcatgctggttgtgtttatgcagcagctactttggctcaggttaaggaagtcattgctcttggtgayacmgagcaartaccytt

SEQ ID NO: 539 - DNA, 2872 bp, Ageratum latent virus
  source 1..2872: mol_type = other DNA
gtattgtatatcgaatcagattacaacctcctttatggataccgttaagtcagaacttattctcatgtttttgagtaaccgactgagattttaccagtcgtttgaaattgaacaagctgatatgaaagattgggttaaaattttcttgttcaaatttgtgatcgaacacactgctaagttcgattttgccactgtatttcaaacctttgaaatggttcttggcaaccttggatatgtagttgacgaagtcgaagaagatgatggctatgttcgtgacatagatccgttttaccttccgtacgacgacttagacgtcgattacacatccatgaggtgtgaaatcagtgatgatattcccgatttaccgtccagttctgacgttgagaactatgttgaaaatatcagtcacatccccgagggcacgtcgtgggctagtgtatctgatacgttggaagaattcagagaagagtatcaggatttgaaaactaattctgtttcctttgaaattcccaacgacattgttcttaattttgatgacgatgatggtcaaattaatgaccttgaaattatcgatgccggtgagtctatggctcccgaagtttctgccgatgctgatattaggacatcatgttttgtgtcctatataaccggttctgatcttaagtctaagtggagacctaaggtcactcaggttagacccgatccttcaataattcaagatgcagttgatgaattgttcccaaatcaccattgtgttgatgacagattctttcaagaatgggtagaaacacatgatattgatttggaagttaccaattgcaatttggatatgtccaattttaatgattggacgaaaggtagcgatacacgtttgtgtcctactcttcaagttggtgggttatcacatcgcgtgccgactcagagagaagcgttggtggccataaaaaaacgcaatatgaacgttcctgagttgcaaagccaatttgatcataatacggttttgaatacatgtgttcagagatttctcacacatgttattgataaaactcgtatgtctaaattgatgccgatatctggtgaagagttatattacttcaatcaatatatcgagaataaaaatcctccactttccgaatataaaggccccattcccttagttgctcttgatcggtacatgcacatgatcaagacaactttgaagcctgtggaagaagattctttgcacattgaaagacctgttcctgccactatcacatatcataagaaaggtgttgtcatgatgacctccccgtattttttatgtgctatggtaagattattatatgtgctgaagagtaagtttactataccaacaggaaaataccaccaaatattccagatggatcctaaacgtctgaagaattcaaagtttttcaaagaaatcgacttttcgaaatttgataaatcacaaggtcatttacaccatgatattcagtggaaattactgtcttatcttggtatgcctgaacatgttattgacacatggttcaatgcccatgaagtcagccatatctatgaccaaaattgtgggatcggattttctgtcgatttccaaagaagaactggtgatgcctgtacatacttgggaaatactcttgttactttgagtgtccttagttatgtatatgatttgagtaaaccagatatcctttttgtaactgccagtggtgatgacagtttaattggatcattatctgaattgccaagggatagagaggatttgtgtgtttccctctttaactttgagacaaaatttccacacaatcaaccctttatatgttcaaaatttctcctggtggttgattgtgatgatggatctgaggaagttttagcagttcccaatcctctaaaacttctgcaaaaattaggtcccaaaaaccttcaagtcacagtccttgatgattattaccaaagtttatgtgatattttgtgggtttttgaagatgctgacatttgtaagcgtgttgcagatctcgctgaataccgcaggtttaaaggcctgcacaaatgtcaatttctggagtccgctttgttgagtctaccaagtttagtagcgaatagattaaaatttattagaagaactgtcaatttagagagttcaaaagtttgtattcgcaatgatgtttattccgatcttgttactagtcttgactcacgggctaaatgccgaacttatgatgccgacggttcaaaccgatcgaggaaacgtgaaccctggaagggaggagaaacccgaaccagaggtcgtgctgaacccggaggaaactgtaaaaataaccgcagggtcagttccaacgtcacaatacccaatgagtcaaacattggaagaaagaagccctccaggaaaggagggttcaaattgcattgattgtgccgttaggaaccttcctgaagctcagttttcagtgaaggtgccgaagttgaatatcaacttcgagatatcagagtttccttctgcgaggttactctttgccaacttagccgatagagtgaagatgttaccttttgttaaatcgttgaatgtaccaaacgatttacagaggttacaacttcgttctatgggagatgttgatgttcacatttctattccaaaatttggttgggtccaagttttgaagttatctgatgtgattaccggttttgatttaccgaagatccctacaatagctccaaaattggagtcttgtgtaggtgattgtttaaccacgaataagtcgtgatgcctcttatgagatgagtcttagatgtgggctctcccgcgcttcttgggagtattctaagattttccgataatatataattatattatcgatgccttctataaagaagaagc

SEQ ID NO: 540 - DNA, 3481 bp, Ageratum latent virus
  source 1..3481: mol_type = other DNA
gtattgtttttaacatcggaaaacaacctccgtaatggaaaacgatcaatttaccccatctagttcctcacgttctggatttccagctattgatgtcaataacttgattaaaagttatattgaacatgttaaagctgatgaagtcaccaacgtgggacgatttttaggtgaggtagccttgaaagaaattaaatctcaagttgacaccactaatggtgatttccagaagttaaatgtcggtttccgcttaactcctgatgaaaagaatgctttaaaaactagtttcccgggtcttgaaatagtttttaaagattcatgccaatcttctcatagttttgctgccgcacaccgtgtgtgcgagaccttagatatatacaaaaggtttaatacaaaaactgaaaagatcattgatcttggaggtaattatgtcacccatgctaaacacgggagagcgaatgttcattcttgctgtcccattttagatgttagggatggggctagacatacagataggtatatatctttagctgccgctgtggagaaacatcataaggaactccctgttgatttttgttgccacaagtttgaagattgcgacgttaaagcgccgtatgccatggcgatccattctataagtgatattcctatagccacggttgcaaaacactgtgtccgtagaggtgtccgtaaacttatagcttcggttatgatggatcctgccatgatgttgtatgaacgtggtcatatacccttactcaatgttgattgggaaaaggaagacgttattgatgggggtacgtcaaaaaccctcattcatttccattttgttgatgctcctggtcttagttactcccatgacttttccatcttgtcacagtacatggtcactaatcaagttatagtcggtgatggttactcatatcgagttgaacgtaccgctgacttgaatggagtgttcattgttgagatgacaattagtatgacggatgggagtactatgaatcacatgaaacaattaactgatatttcatgtgcttggctggccaagttgaggaagaaagtttttgttaaacttgctgtaccagtttctaccgagtggtttaccgaagattttgaaattcgatgggcgctcatggatgaatctttagttagatatgtaactgaagctgcttttaggcagtattctgaaactaaagatccaaaaactgtcgtacaatacattgctacaatgttatcttcctcatcaaatcatgttgttataaatggtatcaccatgcgaagtggtagtccgattgctattgatgaatatgttcctttagcagttaccttttatacaatggcagcctggagatacaaaatgattgcccctggaattaatgctgttaccacaaaagtccgtaagaacattgaccaatatatggatagtagtgatgaaactttttccgatttattggttgaagctcaaaagttactgcttcctgatgatgatttaggtctgaagaactgtgaaaaaattccggatcttatcaagtctgctggtcttaggactattaaaggtaaatctttaaagaaatctggggatgataaagccattttgaggtctcacagcgtctttaaagaagtgctttatgatattaaacacttctttggacttactgttactggatcagatttcaattttgtggatgggacacctgcaaatttgaaatccaccgttgtttggaagatcttcgaaaaaaacgtcgagtttccttcatgtcttgacatttctgaatgttcttatgatttaatgaataaacacattgctcagaaatctgttgacgaagaaaacgaaagaagatctagagacttcaaagatgccagagataaagctctgattaccatcgctaaggtacttgaaaaatcggacgtgcctgatggattgttgccgattcttgatttgtgtgacgtcaaacaagaattgatagccgcccaaaattccctgagcttgactccggaggccataaacacgacagcatctcgtggtgacagttccattactgttaatccctatgccgagagcattaaagaggctattcagtactttaatgaacttgagatggtgaacacgagaaatttaagagccttgggcgaatacattggttggagagccgccagtattcaaacttatagagctctaaaaggtaggaatgagtctgtcaaagtgtttataccatttgaaaataaatggtatccggatgataagggtctaaccacttttgaaagggcaatgtcagaagatggttatgttacccttaattgggataatgatggtagatcccttaccgacgcctgcaggaaatcgattagtcgttataatgcattggtagtcgatgattcttgtatttttaatgctggccagcgaatgatacccgctatggaatccgcattgaaaatgaaaccagattttaaggttactattgttgatggtgtcgccggttgtggtaagacgactcatcttaaacgtatctcaagatttgatgcgagtcccgatcttgttttgactagtaatcgaagttctgccgatgaattgaaagatacgttaaactgttgcgatgcgatgaaataccgcattcgtactgttgatagttaccttatgttaaaatcatggttttctgccgacagaatgttgttcgatgagtgcttcttgactcatgctggttgtgtttatgcagctgcaactttagctcaggtgaaagatgtcattgctctaggtgataccgagcaagttcctttcatttctagattacctgagttccgcatgcaacatcataagttagtaggtaaaattgaaactcaaactactacttatagatgtccaagagatgccacgtattgtcttaagaagattttttacaagacaaaatccgtgaagacagcgagttatgttgatagatcgctggaattatgtcctattaattgtgcagtccagataccttgtgaaagtgatactttgtatatcacacacacgagagctgataaagattctcttcttaaaatacctgggtttaagaaagagaacataaaaaccacacatgaggctcaaggagaaacctgggataaggtggttttattccgtttgtcaaaaacgacgaatttgttgcattctggaaaaggtcctgatttaggaccctgtcacaatttagttgccttatctagacatcgtaaatcttttaggtattatactgttgcccctaatgatttagatgatcagattgtgagaagtgttacaattgccaagactctgtctgatggagatcttgatgcagttagattttcttctaactagagagtttctttccactttagtgatgccccttatgggaagacggttattgttaccgtaaatacgtgatggcgcactcgacgcttcttaccgagtgtcacgtattatttccaaagaaaactaagttttctttgatgccttctataaagaagaagc

SEQ ID NO: 541 - DNA, 3431 bp, Fragaria chiloensis latent virus
  source 1..3431: mol_type = other DNA
gaaagttttctttccatttggttatatggattttcaaaatctttcgtcttctgctgtcccttctcctgtctctgtacaagatttattgtcagagacattgaagagacaatgcaccgatgagaccactgctatcggtaagctttttgccgaagaggcaaaaagattggttacccagagttttggtagtgatgctgccaaacctttgaatgtttcgtttcaactctctgctgagcagcagagtttgttaaaacgaaattttcctggacgtgttattcagttttccaatagttcatcgtcgtcgcattcatttgctgcggctcataggctgttggaaactgactttgtttactcttgttttggtaacaagaatgccaccattttggacttaggtggtaatcatgtgtcccatcttaagatggagaggcacaatgttcactgttgctgtccacttcttgacggcagggattgtgccagacatactgaacgtttgatttcatactcgacgttcaaagcttctcatcctcaagaaatccatgatatgaatttttgtgaaaatgcttttcagcattgtgatgagaaggctgattttgcaatggctatacattcgacgtctgatttgccgttagatgttttatgtaaagcgttgctgaaaaagggagtaagaaagttcatctgtacaataatgatagaccccgatatgttggttaaggatcggggttttattgaacattttaatgttagttggactattgacaggtatgccgatagaatctggtttgattttaacgatgcaccctgtttggggtatgatcataagtattcgacacttatgcaatacttgacctataatgcagttgacttgggtgattctgcttatagagtcgaaaggaaacaagatttttccggtgttatggtgattgacataacccgatgtgctggtttcgtccccggtataccacttaattgtggtcgttcctgtgcttggtttaccaagatcaggaacaagaccattgtcaatatttctgacattagagatgaagttaacggaattacacttatccaacgaggtgtcctgattgatactaaggtgttgatcagagtctgtgaagcttctttccgacaatttaagcccaatgtcgaagcccgggttgccgtgcaaaacatttgcacgatgttgtcgtctgccaccaatcattgtataattaatggtgtgacgatgattgccggtactcctttgagtgtcgatgattacgttccagttgccactactgtttaccacagagtgaagaagatttatgaatctgttggaacagttctgaacaatatgaatacctaccgtgatcttctagcgaaacatagggctatgacggtagatgatttgctcaatgcggatttttccacgcaagccgaagctgggttgttttctttactcagaattttggcttttcccattcgattcgttgcaaagttaactgggttacttccacctggaactttgaccgaagttgtggggaaaactggatcggttgagaggcacacgtttgtgaggaaatggggtgccacgtttttaaatattgctagacatattttgatggagtatcaagttatgactccttacttggctgatccagagttgtttgtgccacttgagtccgttatgcgagctcattgtgatgaattcggtcccgtcttacagattccagaaatgttgtctgtgaggggattgaaaaattccatcgatgagaagattgccagtgatcgagctgagatcattgcggagaagctcgaggccgataagcttagagctaagcaggagaaagcgattttgactgttgccgcttggattgatgctcatcctgatggtaaggttccggtcggattgggattatcgtctgaggatggtaaattcttgtatccaaaacccacgaccgaggtggttactgaagtcggtgatgatgttgtaaaccctcatgcggactcgattaaagaagcaataatgtatttcgagaccatgtcggctactagtcaatctactttgatagaacttggtaatcattgtagatgggctaactatgggtttaccaccgtgtgggctggtgatgaaaacagacgtatataccaacctagtttaaataaatggactggtccgatgtcagtcagaaatcctacatatcgcggtgaatatgagcgcggtatgactgttgatgggtacgttactttacagtggaaggatggttccatcactgaagaatgccgaagatcacttttcaaatatgaaatagtgatcttcgatgattcgtgtatttttgcagcggccgaacgaatgataccaagtcttcgtaaggcactgaccatttttagtgactttagtgtcactattatggatggtgttgccggttgcggaaaatccacaagtattgttcgaaacgctagtctggacccaaattgcccagatctcgtcttgagcagtaataggtcttcagctgaagatcttagtatcaagataccaggtactagaatagtcaagtctaggtatgttaggacttgtgactcattcctgatgacaaattcaccccctaccgcgaagaaaatgttttttgatgaatgttttatgcagcatgctggttgtatttatgcagctgctactttagcgaggtgttctgaggtgtatgcctatggtgacaaggagcaaatacccttcatttcaaggtgtgattctataagattcacacatgagaaattggagggtaaggtggtgcagcaacttgttacatatagatgtcccgtcgacgccactgcggcgttgtcgaagtttctttataagaagaaaaagaacattgtgactaggcgcaatgttgataggtcaatttctattgttcctataaatgctgtcagtcaaattgaaattgatgacaaagccgtttacataactcatacacaagccgagaagaaggctttgcagagtgctgacggattttcgcgtatgaaagtattttctacgcatgaagctgagggaggtaccttcgacaaagtctattttgttagactgtcgaggacgtcaactcatttgacagctggttcccatcctacaatgggagcatgtcatgggttggttgcactgagtaggcataggacggtatttagatactatactacggctactagtgattcgaacgacatcctttataaggcttgtcgttatgcatctgcgagttccgattctgagttggaatttgctagatatgttccaccaataggtgaagttataaagttgtaggtaaaatctttatgagttgtaccggactaggtccgaagttgtacaagtagtctcctctcatcgccatctgggtggggttttaggagtctatgccaaactctttgagtttgatgccaattcagttttcgtctgaattgatgcccgaaaggatggc

SEQ ID NO: 542 - DNA, 2570 bp, Fragaria chiloensis latent virus
  source 1..2570: mol_type = other DNA
gaaagttttgttacattggtatatgtaatgttttgcccaaaaattttatctttcgttccttcttcagaaccatgggttggttctgaaagtttagatgccagtggtgatatccccaccattgatgattggtatttattaaccaataccgttctcgctgagcgattggtgatagaacgaaggcgacagcttgaaaaggttgtcggtcagtataaaactctccttcattttgtcggttggtgctatcttgaacaagtagtatttaagacgtcgaagtataaaggtgagtttaatactttcccatttcttgtggagcggtttttcgctgcatttgatttggaagcacctcagtatgaggtattgccgatgcagtctgattgtttgtcggatttcttcgatgtcggttgtgttgatttacctcttcctatcgaagaggataccatcagtctgccttccgattttcatcgaagtatttcttcgttgtcttacccgtcatgcggttcgtcaagcatggaaagtgggcgtaccagttcgggaggtcccgagagtacgtccagtgatgtttgtcacgaaatttataatgccggacctgttgatccgatgcctcagtgttcccgtcgctggtcagattataccagcgaggaagatgagtgtgaacttgttccacttagcggtgacaccctaccgcgaggtgagatcccaaatgagatcgttagcgttagtgctacggtcaatcgatgcttggagagttcttatatgtctaccgatattcccgatcttggacgatttatcgaagaaccggtcgaatttgatggattcgaccgtgtggttgctgtcaatgactggtggtctgggatgaagttagtcccaaatcttggtattccggatgattccgatgtgatttttagtggtattttatcttcggcccccgaggtaatgcagtcggccattgacgagtttttaccacttcaccaccagatcgatgacagatttttccaggagattgttgaaaccagtgacatttctcttgaattggaaaactgctcctttgatttgtctagtttcaaatcttggagcagtcatgaaagtgggtgttgttcttctttaaacagtggtatgacttctacaagaacgaatacgtttcgggaagctgccctggctataaagaaaagaaatatgaatgttcccgcaatttcttcaagttgcgacattggtaaagtttccgatgatgttgttgagaagtttttctctcgcatcattgatgttgacaaacttattggtttacctattatcggtcatggtgagttggcttggtttgctgactatcttaagggaaaacccgttaatgaggatatgtttgttgatccgatatgtttagtgtctatggataaatacagacacatggtgaagtctcaattgaaaccagttgaagataattctctggcttttgagaggcctttacctgccaccataacatatcatgataagggtaaagtgatgtccacttcacctttatttttggctcttatgaatagacttcttatgagtttaaagagcaagatttctattcccaccggaaagtttcatcagttattttcgttggatgctcaggtgtttgattccgtgttggaatggaaggaaattgacttttcaaagtttgataagtctcaacaggaattgcaccatgaagttcagaagaagattttccttcgtttgggtttaccaagggatttttgtgatacttggtttacctctcatgtccgttcacatatctctgatccttctggactgagattctccgttaattttcaacggagaacgggtgatgccgtgacatatttgggaaatacagtcgtgactcttgctgttttgagttacgtctatgatttgtctgacccaaatgtgttgatggttgtggcatcgggagatgattcgttgattgggtcatatcgtcctcttgatagatcaagggagcacttgtgctccacattgtttaattttgaggcaaaatttccgcacaatcaaccgtttatttgcagtaagtttttattgactatgcccacgaaaagtggaggtcgtcgtgtggtggcggttccgaatcctttgaaattgcttataaaactgggcattcgcaatttgcaagaggatcagttcgatgcctggtatacgagttggatcgatttgattcattattttaatgatgagcatctcatatccgtcgtagccgagatgtgctcctatcgttatcttaggaagcctagcatgtttttgaaacctgctatgtgttccttcaacaatgtctttgccaataagacaaagttgatgaagtttttgtttccctctatggtattgaggaaggacaaacgtaagagaccgcctcgtaagcggtaatttcgtttgtcgtttatactaaaacaatcttgttttaatgcaagttaagttggacaaggtccagtgtaacttaggtaagtttctcctatcgccatctggatgggatttaagagacttatgtcaaactctttgagtttgatgccaattcagttttcgtctgaattgatgcccgaaaggatggc

SEQ ID NO: 543 - DNA, 3382 bp, Humulus japonicus latent virus
  source 1..3382: mol_type = other DNA
gttatttgtattgatatgtacaaatatacttaatcagacacattaatccgatggattttcttgcaatacagcaactattgcaaaagtcgatcgaggctcaggccaacgacgctacttccgagatcggaaaagctatatctgaacgtgctctcaaattagttgagaatgccacagagaaacgtccctgtgctgaaccgttgaacgtatcgttcgcttgtaccgcagaacaacaagctgttttgcgaagtcacttcccgggacgggaagttagattttctaataaatcctcgtcatcgcactcgtttgctgctgcccacagattgctggaaacagattttatctatggatgttttaatgacaggaattccccgattctagacttgggaggaaattatgtatcgcactttaaacgaggtcggtttaacgtgcattcctgctgcccattgcttgatggcagagatggtgcccgtcatacggagcgcatgctgcaatatgatgcatataagagagctaatcctagaatattagaggaggctgatttttgcaattgcagatttgaagattgttcgcatatggcaaactatgcgatggccatacatgctacctccgatatgccgctagatgtgttgtgtcgtacattagcgaagaagggcgtgaagaaattcatttgctctattatggccacaccagaaatggtatgctttgagaaaggtgaaattgaacacttcaatgtggcttgggaggttgataaaaatgccgatagaattttttttgattttatccgatgctccgtgcttgggtttatgaccacaagtactcctactcttttgcaatacttgaccgttaatgcggtcaaaggaaaaaattgggcttatagagtagagaggaagaatgacatgaacggggtcattatcgttgacatcacttttattagcggtttcaatgataagactgacgtttctgctggtagatcttgcgcatggatgaacaagctgaaatccatgactttagttagaatcgcgggtttaccaaagtcgctatacggcggagagtatcagttgataactcgtcgtggtgtgctcatcaacaccaaagtgttaactagggtaatcgaggcagcctttcggaatttcaagcctgatacccccatgcagaatgccgtccagagtattgcgacgatgctttcatcttccacaaatcacgtggtcgttaacggggtttccattgttgcaggaacgccgttgcaaatgcgagactatatccctcttgccgtagccatttacgtttatattaagcgtggttacgatgctatacccacactttttgagagaactggtcatgccatgaccaagaatatctttgccagtcaatctgtgctagctaaagtggtggatgcttttatttccgagaaatcaaatctgagaatggctgtgtcagatgcggaatatctttactcaggtgaattctcgaataagaaggaaaaggatgctttgtatgagaagactgagatgtgggttaagaactccttcttctcattattaaagacaaccttttgtcaagaattagatcatgaattgggaatcctttcttcccctgatctattcattcccttagatagagtcttagaggatgaatttgagataccaacagttctgacggttgaagaagaatttgccggcttgcagaaaaaaagagaagccgacgagaaagccatgcgagttcagctggataaagatcgagctgagaaattgaaactcgacaaggctattctatcgattgcagcttatatcgataaggctggggataaagctcccattggtattgctaagttgataccagacattgccaaactctcgaaacctgagcaagtttttgaagagcctgatgccattataaatccgtatgccgatagtatatcagaggctatcgagtacattgagtcaacggaggttataatcgaagataaactaaaattggctgggaattcctgcgattggtccaggagaggcatgaactgctgtttcgtgggagatgattccagaagagtttttctgagaaattccaatgcttgggttggtcctccacacatcccaaatgctgcgccgactgagaagtatgaagtagccatgactaaagatggttgggtcttcttggagtgggaagcagaaggttttgtattaacagaaaaatgcaaacgaaccttaccagatttcattttagtgaataaggattgcgtattccagagcggtagaagaataataccagctttgaagcaagctctaaagaaagatgcccggtttaaggtaaaaattctcgatggagttgccggatgtggtaaatcgtaccagatagctaactctgtagatctatctgatgtaaatcgtgatctggtattaactagtaataggaatgccagtatcgagttgcgagaagtgatcaaagcctcacctctgatgaaagcaaaatatgtgaggacttgcgattcttacctcatggcctctagaccagaaaaggctagaagattattgttcgacgaatgtttcatgagacatgcgggtttcgtttacgctgcggccactctggctgagtgtgaagaagttctggcatacggagacaccgaacagattcctgaaattagccgaaatccggcttttaaattcagatgtcacaaattagaaggtgaaattgtccagcagactgtcacttatagatgtcctgctgatgctgtctatgtcttgaataagcatttttataagacaaagagaaatataaaaactaagcgccataaccccatgagatcactgaatattcatgccataaattcagtgcgcgcagtaccagttgacaaatcagctttgtatttgacttatactcaggctgagaaggaacaactgaagtcagcttttcctggtgtgaaagtgttaactgttcacgaagctgaaggtgcttccgtaccaaaggtgatacttgtgaggttgtctagaacttcactaagtttgtacactggtaaagatgcagtttttggagcaagccacgctttagtggctatctcgagacatactcattgttttgagtattataactatgccgctacagatcaagatgatattatttggaaggcttgtagggatgccttgacatgtagtgatgaaactcttttgagtttttgctgctgaattaaatcagcatgtcccaaccaataggttgatgactagtccggtcttgcacccggatgagattaaatccatatggttcgactctctcagaggtttaagtcgaagacatctatgcctattgccccctgtaggagtgcaatagatgttgcgtgaagatatttcttcatttgccctaccaaaaggtaggatgcccctttaagggaggc

SEQ ID NO: 544 - DNA, 970 bp, Raphanus latent virus
  source 1..970: mol_type = other DNA
acccatgatattgaacttgaagtttctaagtgttcccttgacctttcagtctttaatgattggacgaaaggtgccgacacaagagtcagtccggttatggatgttggaggactttcccatagagtaccgactcaacgtgaggtgttgctggcggtaaagaaacgcaacatgaacgttcctgaattacaaagtaccttcgatgaagatgccgttgtgaaacgatgttataagcggttcgtgtctcatgtgatagacaagtctaggttgtcaaaattgggacctatttgcggagaagaagcttattattttgagcagtaccttcgtaataagaacccacctttatcagaatataaaggtccaattccacttgtcgcagtagataaatacatgcatatgataaaaacgacagtgaagcccgttgaagaagatagtctccatttggagagacctatccctgctaccataacgtatcataagaaaggagttgtcatgatgacttcaccatatttcttgtgcgctatgatgaggttgttatattgtctgaaaagaaaaataaccattccaacgggaaaattccaccagatattccatatggatccaattgttttggaggagtcgaagtatttcaaagagatagacttttcgaaattcgacaaatcccaagggaagttacaccatgatgtgcagtccatggtgttctccatgttgggaatcccgaaacattttgtggatacttggtttaatgcccatgaacgcagtcacatctatgatagagattgcggagttgggttttccgttgattatcagcgaagaactggtgatgcatgtacatatctagggaacaccatagtcacactgagtgtcctgagttatgtatatgatttgagtgatccaaacattttgtttgtttgtgccagtggtgatgacagtttgataggttccaccactgagttgcctcgtgataaggagg

SEQ ID NO: 545 - DNA, 2340 bp, Raphanus latent virus
  source 1..2340: mol_type = other DNA
ggtggtaattatgtcactcattctaaggaagcgagacacaacgttcattcgtgttgtccgattttggacgttcgtgatgccgctagacataccgatcggtatatatctttagccggtgccgttgaaaggaatcaccgtgatttaccagtgaatttctgttgccataagtttgaagactgtcaagtgaaggctcctttcgctatggcagttcattccgtgtcagatcttcctatatccactctcgccgcgcattgtatgcgacgtggtgttaggaagatgattgcatctgtcatgatggatccacttatgatgatttatgactcgggccatattcccttgctcaatgtgaattgggagaaggaagaggtggaagttgaagatgacgcgactaaagagaagaatttcctctctagattcgtcacaaggaagaagaaaaagaccttaatccacttccacttcgttgatgcaccaggattgagttatacccatgatttttccgtcttgagtcaatatatgacgaccaatcaggtaatagtcaatgatcaatacgcatatcgcgttgagaggacgactaatttgtctggggtctatttagttgaacttaccttggcgatgactgatgggatgaatttattccatttgagacctatgcgtgatgtttcttgcgcttggttgacgacgttgagaaagaaagtatttgttaaactggctataccagtaacaatgcacgatttgtatgagactccatttgaaataaaatgggctgttatggatgaatcattagttcgctatgtttccgaggctgcgtttagacagtactcgaagacgaaggatgctgaagttttagttcagtacatagcaacgatgttatcatcttcatcaaatcacgtcgttattaatgggataacaatgaggagtggtagccctattgcgttggaagaatacgtgcctttggctgtcactttttatgcattaacgcgtttcagatttcagatgatttctggtggtctcgaagctttgaaaacatccgtccccgaagccagtaggtgtattggtgataaaggggaactggaagggcattacgccggtccatctttgttggaacgagtcggactccatgtttttaaaggtaaggagatcactaagaccagggataacacttatctggttcaaagtagaaatacttttaaagaaatcgttaatgaagtcatgcgtaccttcggccttaagttggtcggagaagccgacgagtatattgattctgccccgagtcattataaagctgttaccgtctggagagcctttgtgaaaaattctggattaccgatcgacatcaacgttgaacgttgtgttaatgacatgatgaccaagcatcaagagtctatagcacagttggtggaggatgaggaaaaagaaaggaaattcaaagatgccagggataaagccctgatgacaatcgcgaaagtgattgaaaaggataccaacgttaaagacggtttgatgccaattctatccttgtgtaaggttgagaaagaattggaatccgcgactagttcaatcgcgttgacgcccgaagcaatcatgagttccgattcccgattggcttcgaatccccagagtttaacagttaatccttatgccgactccattaaggaagcgatacaatatttcaatgaagtcgagatggtgaatacgaggaaactgaaatcgttaggtacgtacctttcttggaatgttccgaatggtccggaagcttaccgtgcgatgtctggacgagatgaatcggtgcaaatttttgaaccattgagaaataagtggtttgggaatttaagaaccgtccctgagtatgaaagagccatgaccgaggatggttacgtttcgttacaatggttaaatgggcaattgacaccacaatgcctatcagcactgaagaagtacgccgttatagtaactaacgaatcttgcatttttaatgcaggacaaaggatgataccagcgttggaagcatcacttcgcttggaaccgaagtttaagattacgatagttgatggagtggctggttgtgggaagacaacctatttgaagagacaatcccgaatggacacatccaatcccgacatcattctaactagcaacaggagttcggctgacgagctcaaggagactgttgtttgtgatgaagcgatgaaacatagaattcgcactgtcgatagttacctaatgctgaagaggtggttttctgccgaccgtttgatgtttgatgaatgtttcctgacacatgcgggttgtgtgtatgcagccgcctccctagctcaagtgaaagaagtaattgctctgggt

SEQ ID NO: 546 - DNA, 7461 bp, Arracacha latent virus C
  source 1..7461: mol_type = other DNA
tgcaaaataggtgattcttcaaagagcactggtactcttgaagaagaaataacaggaactaccagattcggtgatggttatcgagtccttcgatatactaaaccattttatatagatgtctttatgtgctttaatcgttccttttctcgcaattatgattttaaatttcgttgtttgttcaaaaaatttggaaaatcaaaaatatatacagcaagagtgatgtcagcaataggccactcatctggagtgcatcaaatgtggtgtgatgacttcacttgcttcactcgtctgtcaactaaacagtttgcagctgaatgcctcctactgtcagtcgtggagaggatagacgagtttaagaatgtcatgaactacaaacccaacccagtattccgtgaaccggttgggagggccaagaaacagattgcccctttgtgtattcaattccatgacaaggtggaaggaaaggttttggtggggacgcccaaacctgttttaagtgccccaaaaacccgcgtagaccccaacaaagtcactgcggtagatcacaaagtctctggagatggctcagagttctttgttgttaaatacgccaatggttctttcaaaaccgtgcgtaatgatgaccgtgccatcgccaatatgtttaatgccactttagagagaaacacatactacattccgtatgagtgtgtaactccaaatggtggcaggtttttcaactaccaggataaatactgctggttggatgccttcatgcttgctggtaagaagataccagacactcttgttccatacccttatttaacaatcgcttatatgaagcgatgtggtctcgaacgtgtgatgaagggtaggatcactatccacagtgatatgacaggacatttctctgtcaatagaatcaagacactgatcaattggaatgacaaatgtagaatcggtgttaagctcgctgatgagcatgatatgtcgatcaaggacatagacgtgttctttgatgagatttgtgatggaattgttaagcaaaccagtatgagatctgagaacgatcttatgtccaatgttgtcaggagagtgtctgacaagttgaattcctctctatctcaagctagagagttgcaaatatctgtttgcaccactagtaaccagaagaaaaagatcacagatatgtttccagatcttactattggtttctctgataaatcgtattcgtctcacgcactatttacaggcttaagagaatgcgagaattattatatggcaaagaagcagggatttgcaaatttcatagatgccggtggtgatgtcgtcaactatgtgtttaaagattgcaagaacatccatgtatgttgccctgtagttgatgccaaagatgctcagagacatatgactaggagcaatcttcttgataagattgctggcatcactgagacggttgatatctgcgacaacctctgtcaaaattgttacgtcgagaggcccaatatagttgcggttcaggtttatgacatgactttgattgatattgctagaagtctgatagcgcataaagctaagagatttgacttctcgttattcataccaccagagattgttgacagcaactgcgatgtcactatgtttgatggtgccctcaaggtccttgttgataatgataaggtcaaatattcctatggtgattatggtgaaacttattgtcacgacgtcaaaaaccttagggatatactgaagactcaattgttctcagttgatggtatcgtttttaagaagactcttgaatgctcacgagaaggattacacttttatagtgttgtaccttgcgttgggttcaaaaatggcaaatacgagatgacaacccactaccgaaagactgaaattgataaggtgttaatgatattaccaagtcgcaataggttcggtgtcattgagaacactcgtgttaaagttgataaaagtatagtttatcatcttttagaatatgtcatgaacacagcacttagagtggatgaaaaagctcaggaatacctgagttctcaatttagaacacgaaaatcaatgaccatcaagggtggtaaagtcattcaagtcccatttgaattgacctttgatcattatccagggttccttggtgtcattttgggtgaaggtgtcagacttcgcgagaagactacttcaatggctaaactcagctattataaacatctcatgccttcaatcttgtctataatagttgcagcactccacagattagttgtctccgtaaagcagtttgcttatgagaagacaattgatatattgaaacttgtcttggccgaagatttgataactgatatgttatatggtgataggcgtatttttgacattcatgagacttatgaatttacacaagtcgtaaatgtcataggtgatgagagtaatcagagggttttgaatgaatcctttaatactttcatcagtgaatctgaagaaaggttgaacaatttagatgtgcaattagaacctctagattcaagattcaccactgatgaacaagagttgatgagagacattgttcttggtggtggaggatccagacctatatgcgacagaacattggaaaagatttttatcaagctttttaatttgtttgattctgttttgtccaatgttgagaaagcaggaaagtttgctgcttttatttctcaggtagcttaccaattcttattgagaggtaagaaggcttgggatgtggtcaaagatctcatcaagacttttatcagagctgtgatgaccggtggaaagaatctccaatcaagcaccatgaaccttcttaagaaagcggcagcaaaaacaaaaaataaatttctgggtgttaattcacaattgctagccgatcttgagagaatgttagatgaagacgaagtagatcaattaccatcatcaactttatgcaatcatgaagaaacaagtgataaagatgttggtgagattattgtcgaagcagcacgacaatatcctgatttcaaacaaattgagggggttgaagtagtgcaagaaagtgaaccaatcaccgcaggattcactgatgaatttcaagctcagtaccctcagttctcaagattcatttgtcatgggggttttcttagaagatgtgcaaaaaatctctttgaaagaattaccaatatccttaagagatttttcatcattgttaaagatcctaagagggccttccatttgatagttaatggtattgaagatgtgttaaattttccatctgtcattaaatcatattggaagactggattgcggtatatgtatgatagcatagataccatagatgggatgaccgtaatcattcaaggtgtagctttcctcggatctaatttgattttgaccttattgacaggaaatttacacatcatacctaatgtggtggctttattggttttccttggtcttaagaagttcgggattgagaagaaatatttagtggatagtagtgtttcttctcaagtagctagtagtgtgttgggtcttaatcatttcggaatgctcacaattcctattagatttggaatcagccagtatatgatgttgaaattcaagaaaaagcttcttgaagaaaaggttatgccgaacaccatcaatcaaatagtggccaaggacattattcattacaagattgtagacagattcactccaagaatcttaagaacttgtttagggttatctgctcttgtatttctttacatgcctcggttatctataaccatgatgattctcttcgtgctcatcgctgatttcaagaaatatttagagaccttcgctgttcaggccaatatgacattgagcttttcctccgtgttgtcaaagactagtaaatctttgagactcaggaatttcaagcgtatacttaaagaaaaatttatacgtcaacaagctgagggagatgaagaggagatggatggtaatgtggttatatcaggtcagggtgcgaagatttcagaatatgtatctgatgatgagattgaactcgactatgctggtaaagagataatcaaagataatgccactttacaaaacgagaaatttgtaaaatttcaagacgacaagaaagcggctttatggggtgataggagttcatgttcagagtctgatactgtttttagacatcttgaattctcttctttgaacccaacatcagacagacgatatgttgagtgtgaggtatcttttggtttaagtaatgttatattgacatatccatcatcaagtttgaatgtttttattgagactttggatcagcaaacaaatgcattgggtgaattctactacctagagagccagagactgtgcatcgaaataggtaagttggataatgttatagccaaatacaatgcaaaacattccgacagaaaaactttcaaggatgtggtctgggatatgaggaatgtaattgatgatgccactctttatatttcagaagatggtaaacactggcatagattgaagaggggtgattcaggaaacgtgcaattagaaggtagcgcgaaaattgatcttaaccatcacatgactgatcttcttcacactaaatctggtgttcagatcacaagtgatgagatgcttggtatgtacaccaacaatagattattggctttggagaaattcatggatggtgatatgaatttcactaccaagaaactttcgggaatgattaccttctttaacatgcccccgggagctggcaagactacaacaatagtcaaaaagatgaagaatgactataccagcaggactcgttgtttggcattaacttgtacaaacgctggtaaaaaggagattatagctaagctcaaagcagaggggatagcatcagctcacacactggtgtcaacatatgattccttcttgatgaaaggtagagatatcatcgttgacagcttatattgtgatgagatatttatgattcattgtggtcaatgggtcgccgtgatgaacatgatttctgctgcaaatgttgagtgttacggtgataaaaatcaaatacctttcataaatagagtgccaaataccaccgctttacactcaaaaaattttttcatgttgtttccgatgattcatgacaataaatcttacaggtgtcctcctgatgtctgttatttattgtctaacttaacagacgcaactggtaataagttatatcccaacggtgtctattcagcaggaaagaattcagacaatattaagtcaatgagtgttgaacctatgaatgggattaatgagataaaatttgatgccaatgagaaatatatcactttcactcaacatgagaaggaggaagtgacaaggcttggtggaaaaataaagaacacttcaataaatgctaatactgtcaatgaagtgcaagggggcacatttaagtcggtaacgctggtcagggctcgtcagtatgataatcccgtttattccaatgtgaatcaatttgtggttagcatatcaagacacactgacagaatgtgttatcaagtttttccctccaagttaaatgattttgttggtgagaagatctctgctttggatagagtgtctgactacgtagtcaaggagtacaaatttaagcggcgagtttgacgcttatgttttggaagttgacagcttacaaataccaccaaccttgagtcgacctccatcttctcatcataaagcagttaatgagtttatgagtcttataaatataaatttggctgcttatgactacattcatcgaactttaatttatgagttcgaacaatatgaattacctccagttgatgaagtgaaattagatgtatctaaatctagagtgtatcaaccaggtgagtatctcataccagatatattgggtaaaggtgaaagggcgagacctaacacttggaaacaagttatgatgtctttgtcacatagaaacttcagtgcgccaaggattaatgagtatattgatgtcgtggctactgctgaacgtttagccacctcctttatgtctgttatgtctaaagagaaattgtatgaatcttacgagatgatagtaccagatctctatagtatagacaaatggttggagaatcgtgaaggagacaagttgcgtaaattgaagagaagtttttctcatgatttgttggtctctcaattcagcaggatgaagatgatggtcaaaggggaaatgaaaccaaaaatggatgtgtcatcatacactacttatggccctacttccaatatcatctattatgaacatgttgtgaacatgttttattctccaatgtttcttgaggtttttgacagaattgcttactgcttagatgagcgagtagtactttattctggtatgaatctagacacattgagtaaactcataggtagtaaattgagatatccattggtcgaatataacactattgagatagatttcagtaaattcgataaatctcaaggcattactatgaagatgtacgaagagattgtgtacaaattcttcaaattttcagatgttgtttatgataatataaagttcacagaatatttttgcaacatcaaaagcagttgcggtgtatctcttgaactcggtgctcagagacgaactggttctcctaacacttggctgtcaaacactatagtcactttggggataattctaagtgtctactccattgatgatgttgatttgttgttggtgagtggtgatgacagtttgattttcactagaaagagattgccaaatagagctgcagaaatagatagagattttggtatggaagcaaaatttttagaaaattctgtgccttatttctgttctaaattcatagtggaggacagaggaaaaattgaagtcgtaccagatcctgttagattctttgagaagttatcagttcctatcagaatggaagattttctgtacggtgagctgatgaaagaaaagttcacatcccataaggatttgatgcaagggtttgataatgattcagtatgtgtattggtcgacgctatgattgctaaacgatatgacatacctgagatggcatcttatgcagcattatgttacatacattgcttgtgttctaatgcttttgcatttcgtaaaatctatttagattccttttcagtattgatttaatttagatcaatatgtttgcgtgtcttcatccctctgcggtgtgtagcacgtattccactttttatgtgatctttatgatcataattttaagtgttctttttctattatctattattgtcatatgtatagtatgtcgtaaagtcaatagaattaataatatattttgaatgtttttaaaaacattttaaggcaatttcgttagttgtttgtgtcttagagtcatatacgcggttttcgcagtgtgtattgtaaaatctcaaaaaatacaaaaagaagtttagtatagtttatagggaaagcatattaatcttcgttatggtaaatgccattaa

SEQ ID NO: 547 - DNA, 1519 bp, Poa semilatent virus
  source 1..1519: mol_type = other DNA
aaagaccctctgggagaagtctcagtttcagacatacgttaaagaccgtaactacggccttgaagcgtatctgctttttcagcagaagtctggaaattgtgacacttacggctcgaacacttggtcggcagcactggctttgctagattgtctccctcttgaggacgcacatttttgcatcttcgggggggacgattctttgattctatttgaaagtggttaccctgtacccgatccttgtacaaagttggctggcacctggaacttcgaatgtaaggtctttgatttcaaatatcctcttttttgtggaaagtttatgttgaacatcggtggtaaatacatgtttgtacctgatgccgctaagttcatcgttaagctaggtcgagcagatataagagatgcagaagtattaagtgaaattttcatctccattaatgataactactgctcttataaagattataaggtgcttgaagagttagataaagccttagttgatcgttacagggcgccttacagcgctctgtcggctttgacttcgttgtgttactatatcttcgattttcagaagttcaagttgttgttttcgtgtgatggaaattttgtagataaaaagttaagtagggacttcgactggtaaagtctaggtcctgaagtattttgaatctactgtttttcctttcgctcacgtcaacatgtcaaccgacttgtgttctgtgtgtggtaatgtcaaggatgttagtacttttgttgaatctcaggaagatggtaagttctgtagtgcaaagtgccttcgaaaggcgactttcaggagagttagaaagcagctagccgaagagtatctgaaacatgatcttattcctgtttcatgccagctgaattccttcccaggttatcactgcggtatgatctctgctttagagatggacccgtctggtaagcctgttgtgatgaatttctgtggccagaaacacgaagccctcgccttagccttgaaggcaaaagacggtgctaagctgcgacttgaatatctcgaaagacgcttctatcagatgaaggatgtctacgcacggcgactagaccggattgcagagaatctgaaagaggaacgcaaccgactaaccacctcggggactattacagtcaaacgagatggagaggagtctaagcaactagaagttagtgtgcctatgactacggcggattttttcaaactaagtaaactctgaagtactttaattatcaaaacccaaaaagaaaagtgccggtgtgaaatccaccggaaattgccactgcgaaattcagtgacggtattatccaccaaaggataaagtgttttcatgtccacttgaatcgaacatgaacaaatgccttatacggaaactacagagaccttacagtctcgtagagtgaagtatcgggaattggtatgtaagctacttcttccagtagctgcgtcacaacgtcaaggttgtgcatactgagccgaagctcagcttcggtcctccaaggaagacca

SEQ ID NO: 548 - DNA, 6397 bp, Brugmansia latent virus
  source 1..6397: mol_type = other DNA
gtattatttttttaacaacaacaacaaacaacaacaaacaaaacataatacaaacaaacaacaacaatggcacacacacaaacaacaatgaccaacgctcttcttgagaacgctcgcgggactaacagtctcgtgaacgatctcgcaagaagacgcatgtacgatatcgcggttgatgaattcaatgctagggaccgcagaccaaagattaatttttccagagcaattagtgaagaacagacactaattgccacagaagcttaccccgagtttcagattaccttttacaatacacagaactctgtgcactccctcgcgggaggtttaaggaatttggaactggaatacatgatgatgcagattccttacggttcgttcacttacgatatcggaggtaattttgcttcacacctgttcaaaggaagggcatatgttcactgctgtatgcccaatttggatctgagagatataatgcgccataatgggcaaaatgactctgttgaaatgtacgtcaataggatgcaagaaaaggggaaagccttgccggctttccaaaaggttgcctttgataggtacgccaacaaccccgaagatgtactctgcagggacaaattccaggagtgtaagcatagcaaggactcaatgcacggaggaaagacgtacgctgtggctctgcacagtctgtacgatattccagctgatgagctcggtcctgcgcttttgaagaaggacgttaacgtctgttttgctgctttccacttttctgaagagctcttgcttgaaaattccagtgtcactctggacgacattggtggtctgttcactagggagggagacgtcttacacttctccttcgcgaatgagccgactttaaactacactcatagttatagtaatattttaaagtatgtgtgcaaaacttttttcccagcttctagtagtatagtgtatatgaaggagtttttggtgaccagggttaacacctggttttgtaaattttctaaggttgatactctgtacctgcacaagagcattaaatcagtcggttgcgacagcgaccaatttgctagtgcaatggaggatgcttggcagtacaagaagacgctggcaatgatgaacactgaaagaattatgctgaacgattctgcctccgtcaatttctggtttccaaagatgagagacttggtgatagtccctcttttcgacatctctatcgatactggtaagagaagtaggaaggaggtgtatgttaataaggattttgtctacacagtgcttaaccatatccgcacttaccaggccaaggcgttaacttacgccaacgtattatcctttgtggagtcaatccgctctagggtaatcgtcaatggggtcactgctcgttctgagtgggatgtggataaggcacttttgcaagatctggccatgactttctttttgcagactaagttgagttcccttaaaacagatctcctcacggagaaattcaaagtagggaagaaatcactgtctgagcatgtgtgggatgaaattagtacttcagttggaaatctttttccaactctgaaggagagactgttgaggcggaaggtgatcacttcttctgcccaggctttggagatcaaggtaccggacctgtatataacattcaaagataggttcgtgtccgagtaccacaggagtgttgagatgccaaatgttgatatctgtggtgcactagaggaaacccagtcgctttactcggctctgtctgaactttcagttctcaaggacagtaccagtttcgacgttgataaattctcgaggatgtgcaaggtactggaagtagatccgcatctggcggccaaggttgtggtggctgtactgtccaatgatagtggggtaaccctcacttttgaaaagccaaccgaggagaatgtagctaaagttctagctgcaagtccacatgagcctcgagaagaggagattgttttcaagactgacacaacaagctacattgataacagaatcattgctgaagagcgtgtcatcccagtgtccggcctgactggaggaacttcacaagagattgtggaagtgaaggaggatgttgttagcttaagtgactatcataatgcttcagtggagagtatcgtaaaaaagcaaatggtatcgatggtctatacaggcagtctaaaagttcaacagatgaagaactacatggacagcttaagtgcctctttatcggctgcagtatcgaacctccggaaagtattgcgtgattcgatctatggcgacgcaactgatgggaagtacggcgtgtacgacgtacttaagaaagtttggctgatgaagcctatcaggaaaggtcatgcatggggagtggtcgaagagaacaatggaaagatgaaagtggtcttgcttgagtacgcagacgggaacattgtctgtgggagcaattggaggaaaatagctgtctcaactgagtcagtcgtgtactccgatatggctaagctgcaaactttgaggggggttctgaaggacggtgaggtccaggtcagctctgcgaaggttgtgctagtggatggagttcccggttgcgggaaaacaaaagaaattttgcagagggtcaactttgatgaggatctagtgctggtgccaggaaaagaagctgcagagatgataaggagaagagcaaatgcatctggcattgtagtagccaccaaagacaatgttaaaacggtggactcctttttgatgaactatggaaagagaatcgggaggcaaacaaagaatctgtacatagacgaaggtctgatgctgcacactggttgtgtgaatttcctcgttctcctttcactttgcgaaaaagcatatgtgtttggggacactcagcagatcccgtttatcaatagagtacagaattttccataccccgaacatttttcaaagcttgaggttgatgaggtggaaacaagacggtgtactttaaggtgtccagcagatgtgacctttttcctcaatcagaggtattcaggtcaagttactacacagtcaccggtctctaggtcagtttctacagagttgttgcaggggtcagcgtcgctgaaccctattaccaaaccgctggagggcaaggtaattgtgttcactcagaatgacaagcatttcctcgaggagcgaggttacaggaatgtgaacactgtccatgaggttcagggagagacttttgaaaatgtctctattgttagagtcactccaacaccacttagtattgttgctagggatagtccgcatgtgttagtcgccttgtccaggcacactctttcttgtaagtactatactgtagtgttagatgctttgtccagtgtagtcaatgatttgtccaagattagtaattatctcttagatatgtataaagttgagtcaggtgtgcaatagcaattaaaggtggattcggtgtatttgaattccagtttgtttgtgcaagccccaaaaacaggagatgttcaagacctgcagttctactatgacaaatgcctccctggtaatagcgttgtactcaatgagtatgatgctgtgactatgaggctgtctgacaacaggttgaacgtcaaggactgtgtgctggatatgtcgaagtctgttgctcttccgcgtgacgaagtgccggtgttaaaaccggtgatcagaaccgctgctgaaaagccaagagttaacggtcttcttgaaaatttggtggcgatgattaagaggaatttcaatgcaccggatctctctggtattgtagatatagagaatactgcttctgtcgttgttgataagttttttgatagcttcttcataaaagaaaaaaggaaaaagaaacacttggtggaaatgagcagggatagcttgaacaattggctggcaaaacaagagagtgcaactattgggcagttggctgatttcgactttgtcgatttaccgccgatagaccagtacaggcacatgatcaaagctcagcctaagcaaaagctagacctgtcgattcagtctgaatacccggcattgcaaacaattgtgtaccacacaaagaaaattaatgccatctttggtccgctgttctctgagctaacaaggaacttacttgagaacatcgactcttcaagattcctattctttacaaggaggactcccgaacaaatcgaggagttcttctctgatttggactctcatgtcccgatggaaatcttggagttggatgtttctaagtatgacaagtcacaaaatgattttcactgtgctgtcgagtacgagatctggagaagaatgggaattgatgagtacttggcagaagtttggaagaagggccacatgagaacaacactgaaggactacacagcagggatcaaaacttgcttgtggtaccaacggaagagtggcgatgtgacaacattcattgggaacaccgtgataatagcagcttgtttggcttcaatgctaccgatggaaaaggtcattaaaggtgcattctgtggtgacgatagtttactctacttaccgaaaggttgtgagtatcctgacatccagaggtgcgctaatatgatgtggaaattcgaggcaaagctgttcaggaaaacctacgggtacttttgcggtaggtacattattcaccatgacagaggtgctgtagtgtactatgatccgttgaagttgatttcaaaactcggtgcgaaacatatcaagagctatgctcatctggaggaattccgagtgtctctgtcggacgtggcaacgtctttaaataattgcgcgtattatacacagttggatgttgctgttagagagggccataaaaccgctcccagcggagcgtttgtttataagtgtttagttaaatttttgtctgataaaaatttgtttaggagtttgttcacattttaaatggctcttattcagagagaatctgtcaatgttcaggattttatccatttaactggcactgaaaagttgtctttgtctttgttcacacgtgttaagtccgtgcggatatcgactgttgataagctaatcgccaaggaaaatgacagtctttctgatgtggatctgttaaagggtgtgaaattagttaagaatggttatgtgtgccttgtaggtttaatagtttctggtgagtggaacctgcctgacaattgtagaggtggtgttagtgtatgtttgattgacaagaggatgaagaggtctcaagaagcgactctagggtcgtacaatgcaccagcgtgcaagaaaaacttctccttcaagttgattccgaactacagtgtcactaccgctgacgccgaaaggcggccgtggcaggttttagttaatattaaaggagtgtctatggtagagggttactgtcctctatctttagagtttgtttctgtgtgtgtagtacataaaaacaatgtcagaaaaggtcttagagagagagttactaatgtgacggacgaggggcccttagaactcactgaagcagttgttgaggagtttatggatgatgtccccatggctgtcagattagcctctttcaataagagaaaaaacaatagatttgttaataataataaaaaggaaaataacaaaaacattggaaaaggcttcgttaagaagccggtagaaaataaagataaaaataaaaaggttagtggtgaagttaaagttaaggagattggtttagaagttgacgaggactactctatcgaggagtcttccgattcgtatttctagaacaatgtcttatacaataacaacaccaagtcaaatagcttacttgggtgctgcatgggcagacccattaatgttaataaatttgtgtacttcttcacaaggtaaccagtttcaaacgcagaacgcgagaacgaccgtccaacagcagtttgctgatatttggaaggttgctcctgcggtcaacgtgagatttccggaagccgagtttaaggtatacaggtataatcccgtgctggatcagttgatttcagcactattgaattcgtttgacactaggaatagggtgatcgaggtggaaaatcctcaaaaccctactactactgaaactatgagcgctacacagcgcgtggacgatgccactgttaatatcagggcatgtatagttaatttaatgaatgagcttgtacgcggtacggggatgctcaataggactcaatttgagagtactagtgggctaatctggactgctacagcttaataataaaaaatgacggtataccgtcggtggcgtttaccataaaacgcagtgtttttccctccacttaaatcgaagggttttgggcgtggaatcgcatatgtgtggtagtgtgactatctaatcatatgtgcccgagtaaaataaacgagaggttcgaatcctccctcaccccgggttaggggccca

SEQ ID NO: 549 - DNA, 6431 bp, Hibiscus latent Fort Pierce virus
  source 1..6431: mol_type = other DNA
gtatgttttaaaatcaacaacaacaacgattttacaacaacaaacgaaatgacaacttcaactacagacattaaacaacaaattacaaatgtacgagatgatgccgcacatggtgctgcatctctcatcaaaggtttggctactcgtcgtgtatacgatgaggcagtcaataccttaactttattggacaagagaccaaaattttctttttccaatctggtaagtactgaaaatgcaaagatggttactgaagcttatcccgagtttaatatcagtttcgtgggtaaccgcaatacagtccattctctcgccggtgggttaaggaaacttgaaatggaatacttaatgaccttagtcccatacggttctgccacctttgatattggcggaaactacgctcaacatctgttgaaaggaagagcgtatgtccactgctgtaatccgtgccttgactttcgtgacatagcaagaaatgaatcttacaaggacacagtggactcttatcttaaaagattcacaacacccgactgtgggtggttttctggagcggtccgtgctatcaccgcaagacctttaccgtccttccagaaggaagcttttgagcgatataggcaggtaccttccgatgtgacttgttcacaacctttccaggattgtgcaatgagaacacctcctaatcaagactgtttcgccatatctgttcactcgctttatgacattcctgtcgatgaattagggtgtgccctactaaggaaaaatgtgaaaattctttatgctgcactccatttctcggaggatttgttattaggggctactgacgctcctttaggtaatataggtgctagattctatagaaatggtgatgaagtcacttttggttttgacggtgagtctacattactgtacactcacagtttcaagaacatctgtggttatattaccaggagttttttttacgctggtgctaaatatgcttatatgaaagaatttatggttaaaagagtagatactgttttttgcaagtttgttcgtatcgatacccagtgtttgtacaagtccgtatttcatactcagatagactcagatgctgttctagagggtatggactcagcttttactgccagaaggcaagctgcaatgcttaatgctgcgaggccactttttaaagataaggccgcttttagtgtttggttccctaatgccataggaaaggttttaatacctatctttcgtgggaccacctgcttaggagcaaaaattaaaatggaaaaaaggctcgtagatgaggactttgtttataccatccttaatcatatcaggacatacacagggaagcagttatcatatgaaaacgtgctttcttttgtggagtcaatcagatctcgggtggttataaacggcgctaatgtcagatctgaatggaatattcctaagagtgacattcaagacatagccatgtctttattcctgataactaaactcagaactctacaggattccgctgtgttaagtcactttgatataaaaaaaaaagggttttttgactgtgttagagaaactataatggaagtcactggtagcatttttgagcctttgactcaaatttgcattgatcatgggtggttcaagataaaggaggacaagcttaaagttgaagtcccagatacatcaagaactttcatgagttacatgcaaaccgagtttagtgaatcaaaagctatcgagagtctcgacttgtgggagtaccttgatcaaagcaatcaactctacacacatgtatcaaagctgatggaacgatacagccttcctgattttgatgtggagaaatttaaggatctttgcgctcacctcaaagtagggcctgaggttattactgcagtgattgaggccgttatggataaatctttgggcttcactgtagtaggtgggaaagctgagcatcagtttactgatgagatgaaagcggcggtggcagtgagtgctgattatggtcagcattgtaccgacaagaaacaagttgcttctgctgcttgtaagaatgaggtcaccaagccgctgaaaaaacagtgggtcgagaagactactgcggcgttgcctttgcaggcaaccacagaaaaaactcaacatttccattttaacgatgaagatgaaagcatcagtgttgagaatttgcatctgaagagagcagacactttcaaagcttccaaggcctgtatgttatacacgggcactgtgcgagaacagcaaatgaagaactttttagattatctttctgcttctatttgtgctactataagtaatatagaaaaggtccttagcgactattgggtcagtggtacgcaaacgtatcagacttatggtctgtgggactgcaaaaaaaaaaaatgggtacttcaacctccgactgctgggcactcgtgggggattgcttccattaagggtgagcattttatcgtcatgctcagttttaacgagaatgtagagcctatctgtgactcatcatgggatatggtttgtgtcagcaacgatacaaaacttttttcggctatgaaaattctcgaaaatttaacccctctgcctgtaaaagaatccaacgcaaaaatcacactggtggatggggttccagggtgtggaaagactgccgagatacttgccaaggccaatttcaaaaaggatttaattttgacacaaggcaagcaagcagcacaaatgatcagaaaaagggccaatgctatcgactgtacaaagccggctaacaccagcaacgtgcggacagtggattcttttttgatgaatccaaagccctttacttatgacaccctttggattgatgagggattaatgctccacactggtatggtgaactattgcgttttgcttagtcactgtactaagtgttttatatacggcgacactcagcaaattccttttatcaacagagttatgaattttgactacccaggtcatctgaggaccattgtagtcgatgatactgaaaaaagacgcattacttctaggtgtccattggacgttaccttctacctcactcagaggtataagggtccagtgatgtctacgagtagcgtcaccaggtctgtggagacaaaattcgtagcgggaccagcacgttttgaaccgcgtgccaccccactacccgggaaaattgtaacatttacccaggccgataaggagacactcaagaagaagggctataatgacgtgcatacagtgcacgaaatccaaggagaaactttcaatgaggtctcattggtgcggctgactgctactcctttaaatataatatcaccagagtcaccgcacgttcttgtaggtttaagtagacatactaatagattaacctattatacagtagttcacgattgtattacatatagtataagtgagttgagtaggctaagtgattatatttttgacatttatagtgtagaaggccaaaaggcatagcaattacagcaaaaccgtctctacatccacaaaaacattttctgcccgacgcccaagataggctgtatgtctgacatgcaggattactatgacaggtgtcttccaggaaatagttttgtgcttaatgattatgacagagtcactatgcgattggtagacaacgtttttaacgtggaaccatgcactttgactatgtcaaaagctgaccctgtggatgcagaaatgaaattggcatcaaaaaattttttaaaacctttgattagaaccgctgtggaaaaacccagggtgcctgggcttctagagaatcttgtggcaatgattaagaggaactttaattcccctgatcttgccgggattatagatacgcagatggtagctggcagggtggtcgataaattttttgatgactttttcactgatgacggtataaaacatatagattcttgtaaatataataagtatttgtacagtaaagagaatttatctgtttggtatgataaacaacaaccgcaatcagtagggcagttggctaatgctgattttattgattttcctggtgtcgatgaatataaacatatgattaagacacaacccaaaggaaaactcgataatagcattcagaccgagtaccctgccttgcagacaattgtttatcatagtaaacacgtcaattctattttcggtcccatttttagtgagtatactagaattcttttagagtctatagatactaacaaatttttcttttacacaaggaagactgtggacgagcttgaagggttttttagcgatctcactgaccacagtaatatggatgtgttagaactagatattagtaaatatgataagtcacagaatgatttccacttttgcgttgagatgaagatatgggaaagattaggcattgattcctttttgaaacaagtttgggagagtggtcacaaaaggaccacccttaaagactttcaagccggtatcaaaacgatcatttaccatcaacgtaagagtggtgatgtcactacctttatcggtaacaccctcattattgcagcttgcgtaagttcacttctgcctatcaaagattgcattaaagctgcattttgtggtgatgactctgtgatttattttaaaaagggtttagatttctcttgtgtccaatccaatgctaatcttatgtggaactttgaggctaagcttttcaaaaagacctacgggtatttttgtggtaagtatatcatccaccattccggtggctgtataatttaccctgatcctttgaaattgatacaaaagcttggtaataagtctcttacctcgagagaacatgccgaagaatttagggtatcgctttgtgatgtctctagaaacctcggcaactgtgcttatttcgacttgttggataaggccattgctgaggtttttaaacaagctggtggcggttcgtatgcttttaacgctttttggaaatacatcacgaaccctgcgctttttaaaaatctttacgatgactctggaccttgctaatccgctaaagttgttggacgaatcaactgtattcaaggtgagtatagttgataagttagttggcgggttaaagaaaaatctaagggtatgtaatattataaatagtgatgtagcgaaactgtctggtaatggacagtctctttttggtattaaccttactagtaatctaaccgtagagcagaaacaatataaatatgtacatttgcttgctgttgttatttcgggaaaatggcatttgcacaacacggttggaggtggggcgaccattgcactacttgataagaggatcaccgatcctaaacaagcacaattggcaaaaatggtcgtcgctgccaaagtgggagagtttcaaggtaggttgtcgccaaactactctgttactctcgatgatgctgtgaaggatccatgggatatcttcgtaagcattaaggatgtgcctattgaacagggttttcatcctctttcgatcgaggtggctgctttacttatgttttctgacatttgtatcctaaagtcactaaggtcgaaaatggtggaagctcaaattggttttactgatggaattgatggggatgtaccgtgtgaaaatctcgacgcctttatctcaaatgtggatttaattcaagatttaaaaagactgagacaatccgggaaaactcttggtactggagttgtcgctggaagggataagaagggtaagaggtttgaaaagaaatttaaaaagagagtgattgaaagtgatgcgtctgacacagagatatctggggcagacaattcgtatcaatcagaattagaagaagctcaagatgtcttactcgaacataacagctcttaaccttatttactcttctccgacttttgcaccatatgatgtattgttggagatcttaattaagtctagatctaacagctttcagacgcaagctgggcgcgatattcttcgcgaacaacttgttaacgctttgcagattgtagttactcctactactaggtttcctgctgacagatggtatgtgtggtcaagaaatcctactctcggacccgtttttgaggcgctactgcaagcaacggacacaaaaaacagaatcattgagacggaggaagattctcgtccaaccactgcagagaccttgaatgctactcagagagtggacgatgccactgtagctattcataaagaaatagataacatactaggtttattacagggtggtaccgccgtgtacaatcaggcttctttcgagattgcatctggatggacatggaccgctcctgctaactaaaaaaaaaaaaaaaaaaaaaaaaaaaaaaaaaaaaaaaaaaaaaatgtatataagagatgagtcgaggtatcgggtaatcgatggtgggtgccacctagattatggctcattgcttaccgagggaggttcgaatcccccctaaccccgggtaggggccca

SEQ ID NO: 550 - DNA, 6458 bp, Hibiscus latent Hawaii virus
  source 1..6458: mol_type = other DNA
gtatgttttcgattattacttacaattttcaaaaacaacaaacaacaaacaaacaattatgacagatattaatcaacaaattacaaacgtacgcgatgatgccgccaacggggccgcatcattaatcaaagggcttgcaacccgtcgtgtttacgatgaggctgtgggcactttgaaacttttggacaaaaggccaaaattttcctttaccaatactgtatctacagatcaggccaagcttgttactgaaaactaccctgaatttaacgtcagttttgtgggtagtcgtaacagcgtccattcccttgccggtggtttgagaaaacttgagatggagtatctaatgacacttgttccatacggctcaccaacttttgacataggtggaaattacacacagcatttattgaagggaagatcctatgttcactgttgtaacccttgtctagacttccgcgacattgcacgaaatgaaaattacaaggaaagtctagattcttatcttagaagattcactacacctgattgtggttggctatccgcagcctatcgcaaaatcgctgccagacctttacccagttttcaattagaggcaatggagcgatataggcagaacccaacagatgtgacatgcagcttgccctttcagcaatgtaagatgcaaagccctgacggtcaagactgccatgctatatctgttcattccctgtatgatattcctgttgaagagcttggtgcagcactccttcgtaagaaggttaaaactctttttgctgctcttcatttttctgaagagcttctaatgggtgccaccgaagcttctttggggttcattggagcaaaattttacagatctggtgatgaagtcacctttggattcgaaggggaatccactctattgtacactcatagttttaagaatatatgtgcttatataactagatcgtttttcgtagcggatagtaaatatgcatatatgaaggaattcatggtaaagcgtattgatacagttttttgtaagtttgtgcgtatagatacacagtgtttatataaatcagtatatcattgcacaaatgatgcggaaaatttcatcaaaggtatggatgacgccttcgctgttaggcaaagagcagctatgttaaatgcagcgcggcctttgtttaaagataaagccgcgttcagcgtgtggttcccaaacagcgttggaaaagtaatcattcccgtcttcagaggcagtactgtaagctgctcaaaagttaaattagataagctgctggtagatgaagacttcgtcttcactatcttaaatcatatcaggacttacaccggtaaacaactcacgtacgagaacgtgttatcttttgttgagtcaatccggtcgagagtggtcatcaatggtgctaacgtcagatctgaatgggatgtaaaaaaaaaagacattcaagatattgctatgtctctttttttgatcaccaagttaaggactgttcaggacaatcatattcttaaaaactttgatataaagagcaaaagcttttttgactgtgtgaaagaaacaatcactagcgtagctggtagttgctttactcctctagctcaagtttgcattgacaataattggtttaaactcaaagaggatgctctggtaatagagatcccagaactgagtcagacctttatgtcctttatgcaaaaggagtttagtgagagtagagccatcgaaagcttagacttgtgggactatctcgatcaaagctcacagctttatactcatgtgtcaaagttgatggaaaaatatacattgcctgattttgatgtggaaaaattcaaagatctgtgtgccaccttgaaggtgggtcctgatgttatagcaactgtgattgaagctctgatggataaatctttgggcttcacagttgttggtggcagagatgataagactagaagcgcagagttaacagctgctgttgctgtcagtaaagattacgggaaaggttatcatgaagaagcctttgagcagaagcctttggcttccgctgccgcactgaataatacgccaatgtgttcccttaaaaaggagtgggtgaagaaaagagtggcagatatgccgttgcaagcgaccactcaaaaggtgcagagatttttccttactgatgaggaagaaggtgtagacatggacgatctgcatttaatgagaacttctaaattaaaagaaaaaaaaacacaaaaaacttgtatgctttacactggtactgttagagagcaacaaatgaaaaactttttagattatttgtcagcgtctatttgcgctacaataagtaatctagagaaagttttaaacgactactgggtcaccggtagtcaaacttaccaaactttcggtttgtggagctgcaaaaaaaaaaaatggatacttacaccgccctctgctgggcattcatggggtgtggcgtctatcaatagtgagcattttatagttatgctcaattttgatgagaatggccaaccgatctgcgatcctcaatgggacctaatatgtgtgtcgaatgacacaaaacttttttcgtgtatgaggatcttagagaatttattaccattgcctataaaggaatcagtagcgaccgtcacccttgttgatggtgtgccagggtgcgggaaaaccgcagaaatcttaaagaaggcaaattttaaaagggatttaatcttgactcaaggtaagcaggcagcacaaatgataagacgccgtgctaatagcgcggatgttacaaaacctgctaacacagataatgtgaggactgtggattctttcttaatgaatcctaagccctttacttatgacaccttgtggatagatgagggcttaatgcttcacacgggtatggttaattactgtatcctcttaagtcattgcactaagtgcatgatttatggtgacacgcaacaaattccttttattaacagggtaatgaatttcgactacccacaagtcctacggacggtggtagttgactctgtggagaaaagaagggttacttcacgttgtccgctggacataacgtattatctgtctaaccggtatggcggaccagtgatgtcaaaaagcgatattacacggtctgcagatattaagtttgtggcaggtgctgcgagatttgagcctcagctcacacccttgtctgggaaaataataacctttactcaagctgataaagaaactttaaaaaaaaaaggttattgtgatgtgcaaactgtgcacgaggtgcaaggtgagacatataacgaagtttccttggttcgtgtcacaccaactcctttaagtatagtttcaccagattcttcacatgtactagtaggactatctagacatactaatagattaacttattacactgttattcatgattgtataactcatactattactgagttaggtaaagtaagtgaatatatatttgacatgtatagtgtagaaggtcagcattcatagcaattaacgcaaaacagggtttatatacatagaaacattttttgtccaactccaaagttaggaacgatatcggatatgcaaaactattacgacaggtgtttgcctgggaatagctttgttttaaacgattatgatagaataaccatgaggttggttgataactgttttaatgtagagccctgtgtattgactttaagtagatttgaccccgtagattcggagatgaaattgtcatcaaagtcttttttaaaaccaatgttgcggacagctgctgagaaacccagaacccctgggcttttagaaaatcttgtcgctttaataaagagaaatttcaattctcctgatttaagtggcattattgacatcgacagcgtcgccacagtggttgtggaaaagttcttcgatgattatttcaccactgaaggtattgtgcatataaatagtagtaagtataataaatttttatatagtaaagagaatttttctgtttggtttgataagcaacagactcagtctgttgggcaattagccaatgccgactttattgacatgccaagtgtcgatgaatacaggcatatgataaaaacccaacctaagtctaaattggattgtagcatacaaacggaatatcctgcgctacaaacaattgtttatcatagcaaacatgtaaatgctgttttcggtcctatttttagtgaatatactagaataattttggagtctatagatactacaaaattttttttttatacaagaaaaactgtggaagatttggagttgttcttcagtgacttaacggatttgagtgaaatggatgttttggaactggatataagcaagtatgacaaatctcaaaatgatttccactttgctgtggaaatgaaaatttgggagcgtctagggcttgattcatttctaaaacagatgtgggaaagtggtcacaagaagacgactttaaaggattttcaagctggcattaaaacgataatttaccatcaaaggaaaagcggagacgttactacctttattggtaatacattaataatcgcagcttgtgtgagcagtttgcttccgataaaaaatgctattaaagcggcgttttgtggggatgattcggtaatctactttaaaaaaggggaagattacgcaaatctccaaacaaacgctaatttaatgtggaattttgaagctaaattgttcaagaagaaatatggttacttttgtggtaaatatataattcaccacgggggtggctgtataatttatccagacccgttgaaacttatgcagaaactcggtaataagtctctgacctctcgacaacacgccgaagagttcagagtctcattatgcgatgtatcaaaaaatttgggtaattgtgcgtactttgatttgttggataaggccattgctgaggtttttaaagaagcaggtggcggttcgtatgctttcagatcttattggaaatttataacgaaccccaggctctttgaaagtctctatgtcgagtcttaatctagcaaatcccttgaaattactggatgaatccactgtttttaaaactaactttatttctaaaattaaaaatggtttcaaaaaaaatattagagtctgtaatattgttgatactgatgtagcaaaattatctggtaacggccaatcgctttttagcgttagtcttaccagtaatttaactgtagaacagaaggcatataaatatgtacatttattagccgtcgttatttcaggtaagtggcatcttaataaatctgttggtggtggtgctactgtggcactactagacaaaagaattactaatccgtcacaggcacaattggcaaaaatgacagttgcagcaaaagttggtgagtttcaaggcagactaacaccaaattattctgtaacaattgatgatgcggttaaagacccatgggagatctttataagcattaaagacgtgccaattgaacaaggtttccatcctttgtccgtagaggttgcagctttgctgatgttctctgacatctgcattttaaaatctctacaagcaaagatggtggaggcaaaaatcggcttttcggaaggaactgatggtgatatacctcatgaaattctggatgatttcgtaacaaacacgagtgtgattcaggacttaaagaggttaaggcaagccggtaataaacttggtagtggcgttattggtggtagagacaagaagggaaaaagatttacgagagattttaaaaagagggaggtagttagcgatagttcagatacagaattttctggagctgaaagtgtgaattcatcactaccttccttatctgaaagtgaagatgccttactcgaacataacgacacttaacttaatatattcaactggtacttttgcaccttacgatgtgttcttagaaatattaattaagtctagggagaatagttttcagacgcaagcagggagagatactctccgtcagcaactggttggtgccttacaagtagttgctggtaggaattttcgctttcctgctaataatacttatgtgtggtctagaaatcctacgttgtcccctgtgtttgaggctttgcttaaagcgaccgacacaaagaacagaattattgaggtggaacaagattcttcacggcctacaaccgcagagacattgaacgcaacacaacgtgtggatgatgctactgtagctatacataatgaaatagatagaattttaagtttattgcaaggcggtacggcgctctacgacagagccaacttcgaaagtgcttcgggttgggtctgggcggatgctccggtagcctagttttttaaaaaaaaaaaaaaaaaaaaaaaaaaaaaaatatatataagagatgagtcgaggtatcgggttgtcgatggcgggtgccgcctagacaatggctcattgctttccgagggaggttcgaatcccccctaaccccgggtaggggccca

SEQ ID NO: 551 - DNA, 6485 bp, Hibiscus latent Singapore virus
  source 1..6485: mol_type = other DNA
gtatgtttttagtttgaacatttcaacaacattcaactacgaaacagcaacaacaaatatgactacagacattaaacaacaaatcacaaacgtacgcgacgacgcatgccaaggggcatcgtcgttaattaaaggtttggccacccgtcgtgtgtacgatgaggcggtacaaaccttaacagtgttggacaaaaggccgaaattcaccttttctaatatggttacagccgatcaggcgaaacttgtcactgaggcttaccccgagtttaatataagctatgtgggcaataggaacgccgtccattcactggccggaggattgaggaagttggaaatggaatatttgatgacactcgttccttacggttctcctacctatgacataggaggaaattatgcgcagcaccttttgaaaggacgatcatatgttcactgctgcaatccttgtttggatttcagagatatagccagaaacgagaattacaaggagactttggattcatatctgaagcggttcactacgccagattgcggttggttctccgcggcgtgcagaaaggttactgcaagacctttgccttattttcaacaggatgcattcgaacggtatagacaaaatccgaaagacgtcacctgttcagaaccctttcaggattgttgtatgcaaccccctagtaatcaggattgttttgcaatttctgtgcattcactctatgacattcctgtcgatgaattgggcgcggcactcttaaggaagaacgtaaaaactctttacgccgcactccatttctccgaggagcttttaatgggcgcaactgaagcgcgactgggcacgattggtgcaaaatttttccgggagggtgacgaggtcacattcggtttcgatggtgaatccacccttctttacacgcactcctttaaaaatatttgtgcttatattactaggagttttttttatgcaggagctagatttgcttacatgaaagaatttttagtacgccgtgtagatactgtctattgtaaatttattaagatagacacgcagtgtttatataagtccgtattccatactgatatcgataacgaaaatatgataaaaggtatggatgaggccttcatgtacaaacgagaagccgcgttgttgaacgcagcaagacctatttttaaggataaggccgcttttcgtgtgtggtttcccaattctgtaggaaaagtgattatccctttttttaaaggtagttcatgtacatccgccaaggtaaaggtgaaaaaaagactggttgatgaagactttgtcttcactgtgctaaatcacatccgcacctattccggcaagcaactgtcatatgaaaatgttttatcgtttgtcgagtccatccgatcgagggtggtagctaacggtgctaacgtgcggtcagagtgggatatcccaaagtctgagatccaagatatcgccatgtcattgtttttgatcacacggttaagaactctgcaggacagtaatgttcttcagcagttttcggtcaagggcaagagtctgacagatctcgtgaaggaggccctagggggtcttgtcggttcgatgtttgaaccactgactcaagtttgtatagaccggggttggtttaagttagcagagcacactttaaaagtggaggtgccagagctttctcaaaccttcgagagttatatgcaaacggagtttagtgagtcgaaagcaatcgaagcactggacgtctggagctatctggatgagagcaatcagctttacacccatgtctcaaaattgatggagaagtatacaatgcctgattttgatgtggaaaaattcagggagctctgcgcgctactaaaggtgggaccgaacgttatatcaacggtcattgaagcagttcttgataattcactaggcttcacaattgttggtgggaaacccgagcatcaatattctgatgagatgaaggccgctgtcgccgtaagttctgagtacggaaaagggaaagaatatggcaacatcgccgctgcggctagcacctacacacctgaaggcccgcttaaaaaggagtgggttaaaaaaaacgctgtgcaaatgcctctacaggctacaacggagaaggttcaacgctttcatttgagcgaggagagcgagcatattaacgtggaaaatctgcacatggtcaacaccagcgtgttcaccaaggcaaaagcttgcttactctacacaggcacgttaaaagagcagcagatgaagaattacttagattatctctcagcatctatctgcgccactataagcaacatcgaaaaagtcctacatgattactggacaactggtactcaacagtatcagtcctacggtctgtgggatgtgaagaaaaagaaatgggtgttgtgtccacccacggcaggtcatgcatggggggtcgcggctatcaaaggcaagcatcacattgtgatgctcaactttgacggtaatgatcaacctatctgtgataaggagtgggatttagtttgtgtcagcaatgatacaaaactattttccactatgaaaattttggaaaacctgcagggttgcaagatacaggaaccgaaggcaaagataacattagtggatggggttccgggatgtggaaaaactgccgaaatcttgagtaaggcagatttcaagcgtgatctgattatcacgcaaggaaaacaggcagccgctatgataagaaaaagggcaaacgccaatgatcctacgagaccagcaaacaacgataacgtgagaacggtggattcgtttttaatgaatccgaaaccatttgaatacaaagtcttgtggatcgatgaagggttaatgctgcacactggtgcaatcagtttttgcgtcgcactgagccattgtgaacagtgctacgtttttggagatacgcagcaaattccctttattaacagagtcatgaattttgattatccgaagaccttgcaaacgctggtcacggattctgtagagaaacggcggattacatcgcggtgtccgctagatgtgacctgttatctggcgcagaggtataagggacccgtggtgtcaacgaacaatgttgagaggtcccttgacacaaagctcgtggctggtgccgctcgctttgaacctcagcttacaccattaccgggcaaggtaataacttttacccaggctgataaagagacacttaaaaaacgcggatatcaagatgtgcatactgtgcacgaggtgcaaggtgagacctatactgaggtgtcgttagtgcgtctcacgccaacacccctgagcattatttcgcctgactctcctcatgtattagttagtttatctagacataaaaataggttagtttattataccgtagttaatgactgtattacttatgctataggtgagttagctaagttaaataattttatgtttgatatgtatactgtggagaatcagaaagcatagcaattacagcagcatcgcctctacatccacaaaaacatcttttgtcctactcctaaaaccggaaccatttctgacttacaggagtattacgataggtgtttacctgggaatagcttcgtccttaatgattacgatcgagtgtgtatgagactcgttgacaacacgttcaacgttgaaccatgcacactgactttaagtaaagctgaccctgtggaggcagagatgcgattaaatagcaagaattttttgactccattgttgcggactgctgtggaaaaacccagggtgcctgggttgttggagaatctcgttgctttaattaagaggaattttaattcccctgatttggctgggataatcgacaccaagcaggttgcaactaatgtagtcgataaattcttttctgattactttaccgtagaaggtttagatcatataaatagatgtagaaataataagtttttgtatagtaaagagaacctttctgtatggtacgataaacagcagccgcagtccattgggcagttggctaatgctgatttcatagatttccctagtgttgatgagtacaagcatatgatcaagactcaacccaagggaaaacttgactgcagcattcaatctgaatatcctgccctacagactatagtgtatcatagtaaacatgtaaatgctatttttggtcctatttttagtgaatttactagaataattttagaatccatagatactaacaaatttttcttttatactaggaaaactgtagaggacttggagttgtttttcagcgatctttctgattcaagcgacatggatgtcctggagcttgatataagcaaatatgataaatcgcaaaacgatttccacttctgtgtggaaatgctgatttgggaacgtctcggtatagacaattttgtcaaaagtatttgggagacgggccataagaaaacaactctgaaagattatcaggctggtataaaaactataatttaccaccagaggaaaagcggtgacgtaactacgttcatcggtaacaccttaatcatcgctgcatgcgtcagctctctattgccggttaaatcggtaattaaaggcgcgttttgcggtgatgattcggtattatactttccgaagggggtagatttaaccgatgtacaagccaatgctaatcttatgtggaatttcgaggcaaaactctttaggaaaaaatacggctatttctgtggtaaatacattattcaccactctaatggttgtatagtctacccggatccactgaagctgatacagaaactaggtaacaaatctttaacttctagggaacacgccgaggaatttagaatatcactttgtgatgtttcgaagtcccttggcaattgcgcatattttgatttgctggataaggccattgctgaagtgtttaaaggagcaggtggcggttcgtacgctttcagatcttattggaaacatataaccaaccccggcctttttaaaaccctttacgatgagtcttaatctggctgacccaatgaagttattagatgagtcgactgtgtttaaaactaacattttagataggtttaggggtggaatgaaaaagaacttgaaggcctgcaacgtcgtcgattgcgacgtggctaagctttcaggtaatggtcagtcactatttagtgttaaccttacttctaatttaactttagaacaaaaatcgtataaatatgtacatttgttagctatagtaatttctggtaaatggcatctgcataacacggttggtggtggtgcgactgtagctttgttagataagcgtataacaaatccacaacaagctcagttggcaaagatggttgtggctgcgaaggtaggggagtttcagggtaggcttacgccaaattactctgttactctggaggatgctctcaaagacccgtgggaagtcttcataagcattaaggatgtgccgatagaacaaggttttcatcctttgtcagttgagattgcagcattactaatgttttcagacatttgtatactaaagtctctgcgggcaaagatgatagaatcacaaatcggttttactgatggaaccgacggcgacataccttctgagaatatggatgcatttgtacagagtgcttctataatgcaagatttgagaagactcaggatggccaataattctcttggaagtggtgtaattgggggtagagataagaaagggaaaaagtttgtaaaggattttaagaagaaaactgtggttagtgataattccgatactgatttttcaggagcggagagttcgtatactacagaattcgactcaagatcagaaacaagctatgccttaccttaatttgacacctttgaatttaatatatactagtggtacttttgctccttatgatgtatttctggagatattggtaaagtcgcgatcaaatagttttcaaacccaagcagggcgcgatactctgagagagcaacttattaattctttacagatagtagctaatttgaatactcgttatccattattagggttttatgtatgggttagaaatcccacacttgcgcctgtattcgaagctcttcttcgtgcaacggacacaaagaacagaatcatcgaggtggaggaggagtctcgtcctaccacggcggagactttgaatgcaacgcagcgtgtggatgatgctaccgtagcaattcataaagaaatagataatatattactattattacagggtggtactgcagtttatgataggacggcgttcgaggtcgtttcaggtttatcctgggctgatcctacaacaacgtctactacaacgtaaaaaaaaaaaaaaaaaaaaaaaaaaaaaaaaaaaaaaaaaaaaaaaaaaaaaaaaaaaaaaaaaaaaaaaaaaaaaaaaaaaaaaagagatgagtcgaggtatcgggtcgtcgatggcgggtgccgcctagacaatggctcattgctttccgagggaggttcgaatcccccctaaccccgggttggggccca

SEQ ID NO: 552 - DNA, 9422 bp, Rubber tree latent virus 1
  source 1..9422: mol_type = other DNA
tatagctatcaagaaattccaacttactagttatacaacccaactttcaagcaatcccaatcccatgtttctttaagtttttattgaaacaagaattagagtactctttcccgagtacttatcaattgaggtggaagattttctgacacctatttcaatggccttaagtggtattctttctttggatccagctttacaagtggatttctgtgaggtgactacagctttagatgacctttcacctaatgtgctgtacccacatacttcttatcaactctgtaccgaacctgaacttctttggggtaggtattctttctgtagattaactaaacattattttgtgagtaaattagtagattcatataaaactttagtatgtgtcaaaaatgcaatttctgttaatggtgtgcgtgatggtgctttcttttcttataaactatttcctggtgattgtgtgtctttagatagagtagagagtttgtcctatagtccaggtataccgtttagtatgtgtgattttattgttcttaggaatcagttacctttatatattaatactagtaatgctttagttacttctaatggatattgttatttacatctttttgattctcctcaacgcgactgtacttatctgtttgccattgctcaacgttttggtaagtacccatattttaaagatgtttataaccatttacactctctcaatgtgcgtgaggtacctgttatagtgaaggtagaacgcgatctttaccatgttttccctcaacaaagacgacaactgtcggaatactcgtacatactggatcttccaggagtacattacattggaggggacacatctggttttaatcttgcgcgttctgctcaacctatggctgatgtctcggttcatttgtctccagagagtactgctctacttgatgtggttggtttagtttctgaggagagtaagagcagttttgtgaagagtcttctcttagacaatcattgttttacgaggaagacgattgatgaaaaactcagtaaagatctatcaaatgtcagagggaagagaggacgaccttcagttgttattcataatgtcctttctcatgaagagttcaaacatcttgagtcagattatccagagtttacaattaaattcgaacaagatgttaaaactcctcatgcttatgcagcagctagtaggaaattggctcacagtctcattttcaaggaaattggtttcagaccagatagagttatgagcaacagacacatggttgatgtgattgatattggtgggaactggtacagtcatattgttgctgacagaccccgagtgcattgctgctgtcccattttgtctgttcaagatgatgtgcgagagaccactagaagaagatttttttctgaactgtctcgtccagtggagccaaaagtggagcgagagattcgtaaactgcgatccattgagtattttgaaaatccaaagacgcggtggcgaattcgttgtttgaaaaaggctcaacattgctcagtcacagcaccagtggcaacaatgattcattctgcttatgacatgactactgaagagattgcggattctatgacgcgtcataagtgtgcatttcttatgggggtgataatgttcactcctgagattatcattgaagagaagggtattctaccgtggttagattgtcagtttgatcggtcaagaggagatggtatgattcacttcaatttccgaggtgaagcatcttttggatacagtcacaaatgggagaattacagagaattactttcaaagaaagtttggtggaattcagagaaatcacaagcttatgtctgccaacttctactcaatagaacgggtgaacaatacttctctgttactctactgaacaatcctcagattcctcactctaaattgaatcacagggtgtggtttgataattctgaacagcttgtggtgaaattctggtcttttgatgttagagctagcactttgcagaaagccatggtacctaaacagtttatctgcgatcgttggacagcagataagataatgacgtatgctctacgtcaaacaacagaggctaagttcaatgctgcggaaattttttcatatgcagtggccatagattctaaggttattgttgatgggaccactgttatgcggggtaaacagacaaaaccagtagaactctttgatttagcgcatgcgatctatattcaggcatatgttcagcgctacaacagtggtcgggttgataaggcagttcttgatggtattaaggctgaacgagaattatcctcagccggccttttcaagaaatttacaatgttgttcaggaaaggtggttcgaatggttatttgacaagatttcatgatttactgaaccactgggtagtactacctgaattattcccagtatctatctcaaaagctattgagtatgttcaatttgatgagatagtggaaccctttcttaacccacctgaagtttcacaagaattggagaggggtcctttacgaccagaaccaggtgcgcaaatcagagcaacacttcacttagctgaatcagataaggagtcagaagatgaagatgaggatgataaagggtcaaatgtatcttggggcggtctacttccaaccccttccagaggggagaaaagaaagtcaggaaaacctcttgatactttgtcacaggattcgggtagtgaggagaaacaggatcagggggagaagtaccaatggaaaattaaggatattcaagaattctccatttctgcagaaacatggtctctagattcttgtagaaatttctatctggttttcagagatcctgtcaaggaattgcatcttcatagaggtacaagacttttaattcattctgaagtgaaatcacagttacttcctagaagtctagtggttgaactcactccttgttcacctgtacctattgaggagattgtggatggtttcagactcctttccaaagttgaaatcagagatttatttgaactggggttaatagttcttaatgaagatttattttctaaacaatcacatggtccttataagaaaggtcttacttttgaggaattcgtccaaagtctactccctctaagaagagcagttaaggtyggtagatgtgtggggaaaactgttggagctgcattagattcatttgcacatgcagttttacctttagctggtggtgggacgactgtggattccacctacaacaaggctctgagggttccaaagaagatccctactcttcatgctgcggttgcgcttaaaaaccctcttattcggagttctaaggaggagcaagtggtttctacggatgacatcactcagagtactaaggggaaagcagtggtttctgcagaggtgaaagagaagaaaagtgagattgctgattcgggaaaagaaccccagcgtattcaagaggtggttgagattaagtcatcagatgatgagagatctacaacatcagaggtacaacccatgatcataagttctgattctgaagaggagcatatcatagtcaaaccatctcaggaactggtggtggctgagcagaaagcagttttttatggacctgaaatcccacctgagaattcttcttggcaggtaccaataaatatgggtaagtgtcagtgcggtgatcactggcgtatttctgtgaaggctgatggtaattgcttctactatgctttgaaaagactactaccatttcttggttcagtggaggaaatgaaggaaatcctgaaggaaggtctccatgagtttgattatggtgttgcgcgatatctaaggaggattttggatatcccctttcattatgccgaacctgcttgtgtacaacttgcggctaatgtgtttgagcgggatttgtggattcatgaatcttttgactctcctgaaattcaaatcgtcaagagttctaagccagcaaaaggacacctgtgcatacttcttgaaagagctcattttacacctctcttgtgtcataaagaaaaggttctttggtctgagatagttgatgttcccagtacaacatctgagtctgatacctcgattcaggaaagggagtcgaggcgagagaaagagaagggaatggaagtaattcagtctagtgtatcaaatcaggagaggtcctattattaccaaatagagcaactgtcaaattctatgagtctcttcaaacaattacaccgtactaaaccaactctcatcaagaactttccaacagatagtatggtgttcccctttttagaagcgaagagattacggaggaggaaggctcttttttattgtgcaaataaggactgggtctatggacatgataaggtgatttatcagaatggtggttggccggaagatattgctcgtttagctgagcgattcaggtgtaacagtgttttaatacaaatatatgagaaaggagcaactattccaccacataaagatgatgaagcggtctatgatcttgcagacaaccccgtgtttacagtaaattttctgggttcagcaaaattttcttttggagaaaataaaaaggaactacacagcgtagatcttactgcaggagatttacttgtgatgccacctgcttatcagaagaaacattttcattcagtggagagtctttctgaaggtagaattagtctgacgttcagacgccaaaagagaaatcttcctggatatggtcagaccactgttactgaagaatggcagaagaagcagaaagtagaacaggagactactgaagtggtgaaagaaatctccggtggaggaacttggggaaagacgcgtaagcgttcaacaatcaagagaagtcacacaaagggcctgcacttagataagttttcaaacacgaaaacctattctgagatatatgcatcggaattaaaacatctttctgagattgagcaacgcaggtgggctgaattttctcccaagttgaacaataatactttgaagaatgaggtccatagaaatttggtgaatgcacttggagaggtgatggagtactggagggtccatgatgaagttcttcgtagacgtcttcgtgatatctacgtgaggataccaacatcgataatagatacttcttcaagtacagtagcacaacttaaggaacgcggtccaaataaaagagatgtggaggctgctctaaagcgcaatggaattaagacttttgaggtctcaatctgggatacccatcataatcgttggttgtggcaagctgaaggtattcacgattatgagggttgttttgatggtgaatcaattctggagatacccatggaactcaaagcagatctggataagactaaagatcctcgtgaatatacctctctcttcgatatggaactacccttcaggtggttgttattaacgaaagagaccgttcttcttcagagcggtaagttctacaaggtggcaatgaacgaggtgaagcaggctactgattgggtaccacctttgatagattttgtacagggtgttccaggttgtgggaaaacaagttacatccttcgtaaccataagaggagtgtgtggcctccttttaaaaagattctgggggagaagaaatacacaagaaaaccgtctgtgcttggtgatttagttttaactactacccgtgagggagcacatgacatcagaaagcggttaagagatagtggagaggaggtgtacgacaagcaatataggactcttgattcatatattctgaattgttcaataccttttgaagaagtatgggtcgatgaagctctaatgcagcatgctggtgctttggtgttagtggccttgaagactcgctgtaaagtacttcatcttatgggtgatcgtgctcagatagactttatcccacgcatgggtgatgttactcttaggttttgttcaatgggtgatctagtacccacatcaaaaatactgaacactacctatagatgtcctgtagatgtagccgctatcttgagtgaacactatgaacagggtatggtttccacatcaaaagtgcgggaatctatgaaagttgagaggataacagatgcaggacaggttcctaaagaagatgatgcgacatatcttacttttaaacaggcagagaaatttgaacttgtgaagaaaggtttcaaaaatgtgcatacaattcatgaatttcaaggtcttcaaacagataaagtgtacattgttagaacatctcataaaccagctgaagagatttattcctcaatgggtcatattcttgtggctatgagtagacatagggaactactggtttattttacacctgttctacttgattctctggcaaagaagatgttgaagagaccaacagcagcgcaactacaggcagcatcccttcaggttgatgtaccatcaaagagtactagggggggtttttcaactttgtttcctgttgctgaggaaaagaaaattcatagttctacacctcttagcacttcacctattgaatcattgcagacttggtatgatgatacttgtcctggggaggcaacatttgttggtatttatgatcaacaaatggtttttgatgctgatctagcaattgcagtgggaaagagcggaattgatgtgtcaagggtacgccctctgaaaaacagcagaccaactttacgaccaaatttgagaacttcgatgcaacctattaggagaagtggggtgaaagaaactctcttggcttacttcaaacgcaatgctaatgtaccatctctatcgggagacgtagaccccgaggagttgtcgcagcgcatggtggaaatttttgaagagagttacttagacaagaatctgaaaactcactatgcttctatgcggttagaaagaattggttgtaattcaaagcgaattcagaaatggatggatggacactctgatttcacttccaagtgcgagtggccaccttcgatttatgagcatgccaatgatctctacaggtatatggtgaagcgcacagttaaaccagcttttgacggcactaatatgagtgaatataaagctgtacagactatagcctatttggctaaagatgttaatgcagttttctgccccattgtcagagagatgactgaacgtctgcaatccgttctcgatagaagatttattcttttttcaatgatgagtcctgaagagttcgcgagtaggatggaaacacttattgaacctcgcaatgttcacaagtactttaagaaagaagttgacttttctaagtacgacaaatctcaaggtgaagtgttacatctttttgagaagaaaatgtatgcgcgtctagggttttcaggtgagttggctgatttgtattgggcagcgcatgtgtattcaaagtataaagatttcgataatggatttgatgctggtatttggtttcagagaaggacaggtgatgctgcaactttcctaggcaacgccttggttgttatgggtgttttggcctgtgtgtttaatatgcaagaaactcatgctggggcctttgctggtgatgactcgattttgttttctactgaagatatatatagtatagataagagttttatagcgtctcagttgtttaatttagagtctaagttttttacgtttaaaagtgtgtatttttgttcaaaatttttattgaatgtaaatgatagatttgtgtttttacctgatccgatgaaattggtcacaaaactaggaagaacagatttggttgattggattcatttggaggagtactacacttcaatcaaggatctttgtaaagagtactcaaatttttgtattgaaccaagtctaagtgcagctcttaaagaacgttatcctagaactcataattcatcaggatatctcatatctgcactttggtcagtacttaaagattttgaaagtttctcacagttgttctctgaaccacctgagggacttcttattgatcctagtagaccaaatttataaggagtaggaagtatggatggagatcaacaaaaccaaatggctgatcaactcagacgacttcatcatagaactgattcagagttcacagtttctgatatcagtagtgcagaaaagacaaatcttaaggcattactgaatcaattacttagaggcctcgaacgaccttcaactcttgttggagatctttcaaagacttgtttgttgttcatcacgaacttcaatcaagttccaggtgttcttgaggcaggctattacactcctatgagctcagcatctatcatctgttcccatccatttactcctattgatcaggtattgtgtgttttaaatctttgtagaaatttgtgtatagtagaacgtgttgatagtaatttagctaattctcttttttcttctttatatagagtcgtacctgtagtgtctccttttaagcggtttccagttgtgggtcagtttgttgacatcttttcggaaccactggttactgctcttagttctctggtggctcatttgtgttatgctagaggtgcttctgaagacagagaagttgtacttaagtatcaaaaagaattgggtgagttgattctacttatttcttcaccctcatcagctgttgtctattccagagaaacttttgaagaaaggttttctctggtttggaaaactctctagaacatgccatatcttgagaatgagagattggagtgcgtagttagtcaattgtttatctctcaaaaggagcttgcagaacttttagtagtattaaatacattaagtttttctaataagtctgagcgggtgagtgttgctgagaggttgcgtacgaatacaagtcgtatagttacttttcaacatcggtttccttctcaaggtcaatatatattagtgtcttcttcctttttgagtcctttacttagtattttgtttgatactttaaacttttctgatagtattttagctagtggtaaggatgacggtcagatctatgcagccctctatgcaaaagctcgtgaacgcttctatgctgttgtacaccgtcttgcgactcttttgagtctcgtgcaaaattcggaattggtgtgggttaaatcttttaaccgtgcttcttttgaattacattatagagctgtttggaaggaatgaattctccactgtcatctgatccttccgtcgtccagtgtgattcggtgtctgcttttctttttattttactttggttttgtttgggttatcttataggtttgtgttttgctaggtttatagataatgtggcagactaatcctaatagtgttactagagtgtctagtagtttttgttgtcccacttttaatgaaatttttaggtttttatttctttttattctttctttggtttttctaggtgtcctagggtttttattagtttggggtctattgtcattattaggaaaacatatagattagtagtaatttattagtt

SEQ ID NO: 553 - DNA, 99 bp, Spring beauty latent virus
  source 1..99: mol_type = other DNA
gtaaaatctgaggatcgaggttcaattccttgacgacctttggtgttatcgattgtttgaacaaatcaatcttttaaactttttataacctttattaat

SEQ ID NO: 554 - DNA, 33 bp, Ageratum latent virus
  source 1..33: mol_type = other DNA
gtattgtatatcgaatcagattaccacctccat

SEQ ID NO: 555 - DNA, 17 bp, Ageratum latent virus
  source 1..17: mol_type = other DNA
ggaaaacaacctccgtt

SEQ ID NO: 556 - DNA, 34 bp, Ageratum latent virus
  source 1..34: mol_type = other DNA
gtattgtatatcgaatcagattacaacctccttt

SEQ ID NO: 557 - DNA, 34 bp, Ageratum latent virus
  source 1..34: mol_type = other DNA
gtattgtttttaacatcggaaaacaacctccgta

SEQ ID NO: 558 - DNA, 25 bp, Fragaria chiloensis latent virus
  source 1..25: mol_type = other DNA
gaaagttttctttccatttggttat

SEQ ID NO: 559 - DNA, 27 bp, Fragaria chiloensis latent virus
  source 1..27: mol_type = other DNA
gaaagttttgttacattggtatatgta

SEQ ID NO: 560 - DNA, 50 bp, Humulus japonicus latent virus
  source 1..50: mol_type = other DNA
gttatttgtattgatatgtacaaatatacttaatcagacacattaatccg

SEQ ID NO: 561 - DNA, 66 bp, Brugmansia latent virus
  source 1..66: mol_type = other DNA
gtattatttttttaacaacaacaacaaacaacaacaaacaaaacataatacaaacaaacaacaaca

SEQ ID NO: 562 - DNA, 48 bp, Hibiscus latent Fort Pierce virus
  source 1..48: mol_type = other DNA
gtatgttttaaaatcaacaacaacaacgattttacaacaacaaacgaa

SEQ ID NO: 563 - DNA, 58 bp, Hibiscus latent Hawaii virus
  source 1..58: mol_type = other DNA
gtatgttttcgattattacttacaattttcaaaaacaacaaacaacaaacaaacaatt

SEQ ID NO: 564 - DNA, 58 bp, Hibiscus latent Singapore virus
  source 1..58: mol_type = other DNA
gtatgtttttagtttgaacatttcaacaacattcaactacgaaacagcaacaacaaat

SEQ ID NO: 565 - DNA, 157 bp, Rubber tree latent virus 1
  source 1..157: mol_type = other DNA
tatagctatcaagaaattccaacttactagttatacaacccaactttcaagcaatcccaatcccatgtttctttaagtttttattgaaacaagaattagagtactctttcccgagtacttatcaattgaggtggaagattttctgacacctatttca

SEQ ID NO: 566 - DNA, 303 bp, Spring beauty latent virus
  source 1..303: mol_type = other DNA
gccgtgaggctttaaatctgaagtcggaggactttaatcttaagattagtcatctttaatagactggttagaactatttccttaaatagtagagtcattggtctaagcaatgggttttaatcgatcccataatcgatagtcgtgattttcacgcagagatcttacaagatttctaggcgcctttgaggattctccttgtcctcttcggaaggaactttgttccgtgcagtttactacatagtagtattttgactgcgggtgtcgttgatcactttcgtgatcaattggtttcaaaggagacca

SEQ ID NO: 567 - DNA, 113 bp, Ageratum latent virus
  source 1..113: mol_type = other DNA
tgcctcttatgagatgagtcttagatgtgggctctcccgcgcttcttgggagtattctaagattttccgataatatataattatattatcgatgccttctataaagaagaagc

SEQ ID NO: 568 - DNA, 153 bp, Ageratum latent virus
  source 1..153: mol_type = other DNA
agagtttctttccactttagtgatgccccttatgggaagacggttattgttaccgtaaatacgtgatggcgcactcgacgcttcttaccgagtgtcacgtattatttccaaagaaaactaagttttctttgatgccttctataaagaagaagc

SEQ ID NO: 569 - DNA, 154 bp, Fragaria chiloensis latent virus
  source 1..154: mol_type = other DNA
gtaaaatctttatgagttgtaccggactaggtccgaagttgtacaagtagtctcctctcatcgccatctgggtggggttttaggagtctatgccaaactctttgagtttgatgccaattcagttttcgtctgaattgatgcccgaaaggatggc

SEQ ID NO: 570 - DNA, 182 bp, Fragaria chiloensis latent virus
  source 1..182: mol_type = other DNA
tttcgtttgtcgtttatactaaaacaatcttgttttaatgcaagttaagttggacaaggtccagtgtaacttaggtaagtttctcctatcgccatctggatgggatttaagagacttatgtcaaactctttgagtttgatgccaattcagttttcgtctgaattgatgcccgaaaggatggc

SEQ ID NO: 571 - DNA, 206 bp, Humulus japonicus latent virus
  source 1..206: mol_type = other DNA
attaaatcagcatgtcccaaccaataggttgatgactagtccggtcttgcacccggatgagattaaatccatatggttcgactctctcagaggtttaagtcgaagacatctatgcctattgccccctgtaggagtgcaatagatgttgcgtgaagatatttcttcatttgccctaccaaaaggtaggatgcccctttaagggaggc

SEQ ID NO: 572 - DNA, 165 bp, Arracacha latent virus C
  source 1..165: mol_type = other DNA
atgtttttaaaaacattttaaggcaatttcgttagttgtttgtgtcttagagtcatatacgcggttttcgcagtgtgtattgtaaaatctcaaaaaatacaaaaagaagtttagtatagtttatagggaaagcatattaatcttcgttatggtaaatgccattaa

SEQ ID NO: 573 - DNA, 290 bp, Poa semilatent virus
  source 1..290: mol_type = other DNA
agtactttaattatcaaaacccaaaaagaaaagtgccggtgtgaaatccaccggaaattgccactgcgaaattcagtgacggtattatccaccaaaggataaagtgttttcatgtccacttgaatcgaacatgaacaaatgccttatacggaaactacagagaccttacagtctcgtagagtgaagtatcgggaattggtatgtaagctacttcttccagtagctgcgtcacaacgtcaaggttgtgcatactgagccgaagctcagcttcggtcctccaaggaagacca

SEQ ID NO: 574 - DNA, 186 bp, Brugmansia latent virus
  source 1..186: mol_type = other DNA
taataaaaaatgacggtataccgtcggtggcgtttaccataaaacgcagtgtttttccctccacttaaatcgaagggttttgggcgtggaatcgcatatgtgtggtagtgtgactatctaatcatatgtgcccgagtaaaataaacgagaggttcgaatcctccctcaccccgggttaggggccca

SEQ ID NO: 575 - DNA, 159 bp, Hibiscus latent Fort Pierce virus
  source 1..159: mol_type = other DNA
aaaaaaaaaaaaaaaaaaaaaaaaaaaaaaaaaaaaaaaaaaaatgtatataagagatgagtcgaggtatcgggtaatcgatggtgggtgccacctagattatggctcattgcttaccgagggaggttcgaatcccccctaaccccgggtaggggccca

SEQ ID NO: 576 - DNA, 152 bp, Hibiscus latent Hawaii virus
  source 1..152: mol_type = other DNA
ttttttaaaaaaaaaaaaaaaaaaaaaaaaaaaaaaatatatataagagatgagtcgaggtatcgggttgtcgatggcgggtgccgcctagacaatggctcattgctttccgagggaggttcgaatcccccctaaccccgggtaggggccca

SEQ ID NO: 577 - DNA, 191 bp, Hibiscus latent Singapore virus
  source 1..191: mol_type = other DNA
aaaaaaaaaaaaaaaaaaaaaaaaaaaaaaaaaaaaaaaaaaaaaaaaaaaaaaaaaaaaaaaaaaaaaaaaaaaaaaaaaaaaagagatgagtcgaggtatcgggtcgtcgatggcgggtgccgcctagacaatggctcattgctttccgagggaggttcgaatcccccctaaccccgggttggggccca

SEQ ID NO: 578 - DNA, 316 bp, Rubber tree latent virus 1
  source 1..316: mol_type = other DNA
attctccactgtcatctgatccttccgtcgtccagtgtgattcggtgtctgcttttctttttattttactttggttttgtttgggttatcttataggtttgtgttttgctaggtttatagataatgtggcagactaatcctaatagtgttactagagtgtctagtagtttttgttgtcccacttttaatgaaatttttaggtttttatttctttttattctttctttggtttttctaggtgtcctagggtttttattagtttggggtctattgtcattattaggaaaacatatagattagtagtaatttattagtt

SEQ ID NO: 579 - protein, 831 aa, Spring beauty latent virus
MSKPYVPDFEYQIPSFQWLIDDSLKREPEVALDVETGMDVNKVYLPESGFVADGSLASYILAVQPVVKGEGSFEPPFDQARWGVCCEHAASAAEIFTDRHLLPTAEIARMLYLDIPGSFIDESEEDDWVVEDTTDGYGEYRHSDEDAIQSPLFSAELTQEIAEEKPSLSMDLTDENHDERQLSSGPSELTLGDRYVVTNEEFKILDSDYGVTLNLLNPVENRVGLVEDTLPTLDSDSFKEGPKYLERVSLPRLEAAGHTILPTHAYFDDSFYQAIEENSDMSLDFNRINLKQSDVDWYRDPDKYFEPHLNIGSFQRRVGTQKTVLTALKKRNADVPEMGDVVDIKSVAADVARTFLKTFLNKDGKDCLLASMDVLAKGLDYHNKWKTHRDLQGVTLCTEQNLQRYQHMIKTDIKPVVTDTLHIERAIAATITFHGKGVTSCFSPFFTACFEKFSLALKKRFIVPIGKISSLELKNIGLNNKWFLEADLSKFDKSQGELHLEFQREILLSLGFPAPLTNWWSDFHRSSYLSDPHAKVSMPVSFQRRTGDAFTYFGNTLVTMAMIAYTVDLSEATAIFSGDDSLIISDKKLELDTEVFSSLFNMEIKVMDPSVPYICSKFLVETENGNLVSIPDPLRELQRMAKRKILKDKEMLKAHFTSFCDRMKFIEHINEKSIEMLCKFVSLKYKKSIDYDVRVALAAFSYYSENFLRFSECYVTEGSNVFLKKDPIRNVLGEEEPDYHDKDSSWFRDWRNTSFKPSRLLNKLGLYSVEDPLKNVKSDRRVMEKCMNTSLKLAYDNRSLQRMRLKLDYLKDGIGDINSVEVLKNTFVGRT

SEQ ID NO: 580 - protein, 595 aa, Ageratum latent virus
MDKTKSDIIVFFLSNRLKVFQSFDIEQDDYNDWVKLFLFKFIVEHTARYDFATIHQTFVMVMGNLGIVNDEEIEDEDDGYVHDIDPFYLPYDDLDVDYTSIRCEISDDVAPDLPQVSDLENYVENVSHIPEGTSWASVSDTLEEFREEYQDLKTDSVSFEIPETSVLNCDDDDGQLFDLELIDAGESLAPEVSADADIRKSVFISYQTGSNLSSKWRPKIVQVRPDPSVIQNAVDELYPNHFSVDDRFFQEWVETHDIDLEVSNCNLDMSTFNDWTKGVDTRLSPHLQVGGLSHRVLTQREALIAIKKRNMNVPELQSQFDHDKVLNDCVQRFLTHVIDKTRLSKLMPISGEELFYFNQYVENKNPPLSEYRGPIPLAALDRYMHMIKTTLKPVEEDSLHVERPIPATITYHKKGVVMMTSPYFLCAMVRLLYVLKSKFTIPTGKYHQIFQMCPQRLKNSSFFKEIDFSKFDKSQGHLHHDIQQKLFMYLGMPQHVIDTWFNAHEVSHIYDQNCGIGFSVDFQRRTGDACTYLGNTLVTLSVLSYVYDLSKPNILFVTASGDDSLIGSLTELPRDREDLCVSLFNFETKFPHNQP

SEQ ID NO: 581 - protein, 914 aa, Ageratum latent virus
MDKQINFTSPATLRSNVPAIDINNLIKSYIEHVKADEITNVGRFLGDVALREIKSQVDISNGDFQKLNVGFRLTPDEKNALKSSFPGLEIVFKDSCQSSHSFAAAHRVCETLDIYKRFNTKTEKIIDLGGNYVTHAKHGRANVHSCCPILDVRDGARHTDRYISLAAAVEKHHKELPVDFCCHKFEDCGVQAPYAMAIHSISDIPIATVAKHCVRRGVRKLIASVMMDPSMMLYERGHIPLLNVEWEKEDVEDQNGVKTLIHFHFVDAPGLSYSHDFSILSQYMVTNQVIVGSGYSYRVERTADLNGVFIVEMTLSMTDGMTLNHMKQLTDISCAWLSKLRKKVFVKLAVPVSTEWFTEDFEIRWALMDESLVRYVTEAAFRQFSXSKDAKTIVQYIATMLSSSSNHVVINGITMRSGSPIEIDEYVPLAVTFYTMAAWRYKMITPGIDAVTTRARKNIDYLKDTGGETLSDLLVEVQQSVLPNDDXGLKNFEKIPDIIKSVGLRAIKGKSVTKIGDDKTLLKSHSIFKEVLYEIKQFFGLTVTGSDFNFVEGTPANLKSTVVWKVFEKNINFPSCLDVSECSYNLMNKHLAQXASDEENDRKQKDFKDARDKALITIAKVLEKSDVPDGLLPILDLCDVKQELMTAQNSLSLTPEAINTTAACASSSTTVNPYAESIKEAIHYFNELEMVNARNLKALGGYIGWKSAEVQTYRALRGRNESVKVFIPFENKWYPDDKGLTTYERAMSEDGYVTLHWDVDGKSLTDRCKKSVSRFNALVVDESCIFNSGQRMIPALESALKLKPVFKVTIVDGVAGCGKTTHLKRVSRFDANPDLVLTSNRSSADELKDTLDCNEAMKYRIRTVDSYLMLKNWFSADRLLFDECFLTHAGCVYAAATLAQVKEVIALGDTEQXP

SEQ ID NO: 582 - protein, 790 aa, Ageratum latent virus
MDTVKSELILMFLSNRLRFYQSFEIEQADMKDWVKIFLFKFVIEHTAKFDFATVFQTFEMVLGNLGYVVDEVEEDDGYVRDIDPFYLPYDDLDVDYTSMRCEISDDIPDLPSSSDVENYVENISHIPEGTSWASVSDTLEEFREEYQDLKTNSVSFEIPNDIVLNFDDDDGQINDLEIIDAGESMAPEVSADADIRTSCFVSYITGSDLKSKWRPKVTQVRPDPSIIQDAVDELFPNHHCVDDRFFQEWVETHDIDLEVTNCNLDMSNFNDWTKGSDTRLCPTLQVGGLSHRVPTQREALVAIKKRNMNVPELQSQFDHNTVLNTCVQRFLTHVIDKTRMSKLMPISGEELYYFNQYIENKNPPLSEYKGPIPLVALDRYMHMIKTTLKPVEEDSLHIERPVPATITYHKKGVVMMTSPYFLCAMVRLLYVLKSKFTIPTGKYHQIFQMDPKRLKNSKFFKEIDFSKFDKSQGHLHHDIQWKLLSYLGMPEHVIDTWFNAHEVSHIYDQNCGIGFSVDFQRRTGDACTYLGNTLVTLSVLSYVYDLSKPDILFVTASGDDSLIGSLSELPRDREDLCVSLFNFETKFPHNQPFICSKFLLVVDCDDGSEEVLAVPNPLKLLQKLGPKNLQVTVLDDYYQSLCDILWVFEDADICKRVADLAEYRRFKGLHKCQFLESALLSLPSLVANRLKFIRRTVNLESSKVCIRNDVYSDLVTSLDSRAKCRTYDADGSNRSRKREPWKGGETRTRGRAEPGGNCKNNRRVSSNVTIPNESNIGRKKPSRKGGFKLH

SEQ ID NO: 583 - protein, 1097 aa, Ageratum latent virus
MENDQFTPSSSSRSGFPAIDVNNLIKSYIEHVKADEVTNVGRFLGEVALKEIKSQVDTTNGDFQKLNVGFRLTPDEKNALKTSFPGLEIVFKDSCQSSHSFAAAHRVCETLDIYKRFNTKTEKIIDLGGNYVTHAKHGRANVHSCCPILDVRDGARHTDRYISLAAAVEKHHKELPVDFCCHKFEDCDVKAPYAMAIHSISDIPIATVAKHCVRRGVRKLIASVMMDPAMMLYERGHIPLLNVDWEKEDVIDGGTSKTLIHFHFVDAPGLSYSHDFSILSQYMVTNQVIVGDGYSYRVERTADLNGVFIVEMTISMTDGSTMNHMKQLTDISCAWLAKLRKKVFVKLAVPVSTEWFTEDFEIRWALMDESLVRYVTEAAFRQYSETKDPKTVVQYIATMLSSSSNHVVINGITMRSGSPIAIDEYVPLAVTFYTMAAWRYKMIAPGINAVTTKVRKNIDQYMDSSDETFSDLLVEAQKLLLPDDDLGLKNCEKIPDLIKSAGLRTIKGKSLKKSGDDKAILRSHSVFKEVLYDIKHFFGLTVTGSDFNFVDGTPANLKSTVVWKIFEKNVEFPSCLDISECSYDLMNKHIAQKSVDEENERRSRDFKDARDKALITIAKVLEKSDVPDGLLPILDLCDVKQELIAAQNSLSLTPEAINTTASRGDSSITVNPYAESIKEAIQYFNELEMVNTRNLRALGEYIGWRAASIQTYRALKGRNESVKVFIPFENKWYPDDKGLTTFERAMSEDGYVTLNWDNDGRSLTDACRKSISRYNALVVDDSCIFNAGQRMIPAMESALKMKPDFKVTIVDGVAGCGKTTHLKRISRFDASPDLVLTSNRSSADELKDTLNCCDAMKYRIRTVDSYLMLKSWFSADRMLFDECFLTHAGCVYAAATLAQVKDVIALGDTEQVPFISRLPEFRMQHHKLVGKIETQTTTYRCPRDATYCLKKIFYKTKSVKTASYVDRSLELCPINCAVQIPCESDTLYITHTRADKDSLLKIPGFKKENIKTTHEAQGETWDKVVLFRLSKTTNLLHSGKGPDLGPCHNLVALSRHRKSFRYYTVAPNDLDDQIVRSVTIAKTLSDGDLDAVRFSSN

SEQ ID NO: 584 - protein, 1083 aa, Fragaria chiloensis latent virus
MDFQNLSSSAVPSPVSVQDLLSETLKRQCTDETTAIGKLFAEEAKRLVTQSFGSDAAKPLNVSFQLSAEQQSLLKRNFPGRVIQFSNSSSSSHSFAAAHRLLETDFVYSCFGNKNATILDLGGNHVSHLKMERHNVHCCCPLLDGRDCARHTERLISYSTFKASHPQEIHDMNFCENAFQHCDEKADFAMAIHSTSDLPLDVLCKALLKKGVRKFICTIMIDPDMLVKDRGFIEHFNVSWTIDRYADRIWFDFNDAPCLGYDHKYSTLMQYLTYNAVDLGDSAYRVERKQDFSGVMVIDITRCAGFVPGIPLNCGRSCAWFTKIRNKTIVNISDIRDEVNGITLIQRGVLIDTKVLIRVCEASFRQFKPNVEARVAVQNICTMLSSATNHCIINGVTMIAGTPLSVDDYVPVATTVYHRVKKIYESVGTVLNNMNTYRDLLAKHRAMTVDDLLNADFSTQAEAGLFSLLRILAFPIRFVAKLTGLLPPGTLTEVVGKTGSVERHTFVRKWGATFLNIARHILMEYQVMTPYLADPELFVPLESVMRAHCDEFGPVLQIPEMLSVRGLKNSIDEKIASDRAEIIAEKLEADKLRAKQEKAILTVAAWIDAHPDGKVPVGLGLSSEDGKFLYPKPTTEVVTEVGDDVVNPHADSIKEAIMYFETMSATSQSTLIELGNHCRWANYGFTTVWAGDENRRIYQPSLNKWTGPMSVRNPTYRGEYERGMTVDGYVTLQWKDGSITEECRRSLFKYEIVIFDDSCIFAAAERMIPSLRKALTIFSDFSVTIMDGVAGCGKSTSIVRNASLDPNCPDLVLSSNRSSAEDLSIKIPGTRIVKSRYVRTCDSFLMTNSPPTAKKMFFDECFMQHAGCIYAAATLARCSEVYAYGDKEQIPFISRCDSIRFTHEKLEGKVVQQLVTYRCPVDATAALSKFLYKKKKNIVTRRNVDRSISIVPINAVSQIEIDDKAVYITHTQAEKKALQSADGFSRMKVFSTHEAEGGTFDKVYFVRLSRTSTHLTAGSHPTMGACHGLVALSRHRTVFRYYTTATSDSNDILYKACRYASASSDSELEFARYVPPIGEVIKL

SEQ ID NO: 585 - protein, 786 aa, Fragaria chiloensis latent virus
MFCPKILSFVPSSEPWVGSESLDASGDIPTIDDWYLLTNTVLAERLVIERRRQLEKVVGQYKTLLHFVGWCYLEQVVFKTSKYKGEFNTFPFLVERFFAAFDLEAPQYEVLPMQSDCLSDFFDVGCVDLPLPIEEDTISLPSDFHRSISSLSYPSCGSSSMESGRTSSGGPESTSSDVCHEIYNAGPVDPMPQCSRRWSDYTSEEDECELVPLSGDTLPRGEIPNEIVSVSATVNRCLESSYMSTDIPDLGRFIEEPVEFDGFDRVVAVNDWWSGMKLVPNLGIPDDSDVIFSGILSSAPEVMQSAIDEFLPLHHQIDDRFFQEIVETSDISLELENCSFDLSSFKSWSSHESGCCSSLNSGMTSTRTNTFREAALAIKKRNMNVPAISSSCDIGKVSDDVVEKFFSRIIDVDKLIGLPIIGHGELAWFADYLKGKPVNEDMFVDPICLVSMDKYRHMVKSQLKPVEDNSLAFERPLPATITYHDKGKVMSTSPLFLALMNRLLMSLKSKISIPTGKFHQLFSLDAQVFDSVLEWKEIDFSKFDKSQQELHHEVQKKIFLRLGLPRDFCDTWFTSHVRSHISDPSGLRFSVNFQRRTGDAVTYLGNTVVTLAVLSYVYDLSDPNVLMVVASGDDSLIGSYRPLDRSREHLCSTLFNFEAKFPHNQPFICSKFLLTMPTKSGGRRVVAVPNPLKLLIKLGIRNLQEDQFDAWYTSWIDLIHYFNDEHLISVVAEMCSYRYLRKPSMFLKPAMCSFNNVFANKTKLMKFLFPSMVLRKDKRKRPPRKR

SEQ ID NO: 586 - protein, 1041 aa, Humulus japonicus latent virus
MDFLAIQQLLQKSIEAQANDATSEIGKAISERALKLVENATEKRPCAEPLNVSFACTAEQQAVLRSHFPGREVRFSNKSSSSHSFAAAHRLLETDFIYGCFNDRNSPILDLGGNYVSHFKRGRFNVHSCCPLLDGRDGARHTERMLQYDAYKRANPRILEEADFCNCRFEDCSHMANYAMAIHATSDMPLDVLCRTLAKKGVKKFICSIMATPEMVCFEKGEIEHFNVAWEVDKNADRIFFDFIRCSVLGFMTTSTPTLLQYLTVNAVKGKNWAYRVERKNDMNGVIIVDITFISGFNDKTDVSAGRSCAWMNKLKSMTLVRIAGLPKSLYGGEYQLITRRGVLINTKVLTRVIEAAFRNFKPDTPMQNAVQSIATMLSSSTNHVVVNGVSIVAGTPLQMRDYIPLAVAIYVYIKRGYDAIPTLFERTGHAMTKNIFASQSVLAKVVDAFISEKSNLRMAVSDAEYLYSGEFSNKKEKDALYEKTEMWVKNSFFSLLKTTFCQELDHELGILSSPDLFIPLDRVLEDEFEIPTVLTVEEEFAGLQKKREADEKAMRVQLDKDRAEKLKLDKAILSIAAYIDKAGDKAPIGIAKLIPDIAKLSKPEQVFEEPDAIINPYADSISEAIEYIESTEVIIEDKLKLAGNSCDWSRRGMNCCFVGDDSRRVFLRNSNAWVGPPHIPNAAPTEKYEVAMTKDGWVFLEWEAEGFVLTEKCKRTLPDFILVNKDCVFQSGRRIIPALKQALKKDARFKVKILDGVAGCGKSYQIANSVDLSDVNRDLVLTSNRNASIELREVIKASPLMKAKYVRTCDSYLMASRPEKARRLLFDECFMRHAGFVYAAATLAECEEVLAYGDTEQIPEISRNPAFKFRCHKLEGEIVQQTVTYRCPADAVYVLNKHFYKTKRNIKTKRHNPMRSLNIHAINSVRAVPVDKSALYLTYTQAEKEQLKSAFPGVKVLTVHEAEGASVPKVILVRLSRTSLSLYTGKDAVFGASHALVAISRHTHCFEYYNYAATDQDDIIWKACRDALTCSDETLLSFCC

SEQ ID NO: 587 - protein, 323 aa, Raphanus latent virus
THDIELEVSKCSLDLSVFNDWTKGADTRVSPVMDVGGLSHRVPTQREVLLAVKKRNMNVPELQSTFDEDAVVKRCYKRFVSHVIDKSRLSKLGPICGEEAYYFEQYLRNKNPPLSEYKGPIPLVAVDKYMHMIKTTVKPVEEDSLHLERPIPATITYHKKGVVMMTSPYFLCAMMRLLYCLKRKITIPTGKFHQIFHMDPIVLEESKYFKEIDFSKFDKSQGKLHHDVQSMVFSMLGIPKHFVDTWFNAHERSHIYDRDCGVGFSVDYQRRTGDACTYLGNTIVTLSVLSYVYDLSDPNILFVCASGDDSLIGSTTELPRDKE

SEQ ID NO: 588 - protein, 780 aa, Raphanus latent virus
GGNYVTHSKEARHNVHSCCPILDVRDAARHTDRYISLAGAVERNHRDLPVNFCCHKFEDCQVKAPFAMAVHSVSDLPISTLAAHCMRRGVRKMIASVMMDPLMMIYDSGHIPLLNVNWEKEEVEVEDDATKEKNFLSRFVTRKKKKTLIHFHFVDAPGLSYTHDFSVLSQYMTTNQVIVNDQYAYRVERTTNLSGVYLVELTLAMTDGMNLFHLRPMRDVSCAWLTTLRKKVFVKLAIPVTMHDLYETPFEIKWAVMDESLVRYVSEAAFRQYSKTKDAEVLVQYIATMLSSSSNHVVINGITMRSGSPIALEEYVPLAVTFYALTRFRFQMISGGLEALKTSVPEASRCIGDKGELEGHYAGPSLLERVGLHVFKGKEITKTRDNTYLVQSRNTFKEIVNEVMRTFGLKLVGEADEYIDSAPSHYKAVTVWRAFVKNSGLPIDINVERCVNDMMTKHQESIAQLVEDEEKERKFKDARDKALMTIAKVIEKDTNVKDGLMPILSLCKVEKELESATSSIALTPEAIMSSDSRLASNPQSLTVNPYADSIKEAIQYFNEVEMVNTRKLKSLGTYLSWNVPNGPEAYRAMSGRDESVQIFEPLRNKWFGNLRTVPEYERAMTEDGYVSLQWLNGQLTPQCLSALKKYAVIVTNESCIFNAGQRMIPALEASLRLEPKFKITIVDGVAGCGKTTYLKRQSRMDTSNPDIILTSNRSSADELKETVVCDEAMKHRIRTVDSYLMLKRWFSADRLMFDECFLTHAGCVYAAASLAQVKEVIALG

SEQ ID NO: 589 - protein, 2375 aa, Arracacha latent virus C
CKIGDSSKSTGTLEEEITGTTRFGDGYRVLRYTKPFYIDVFMCFNRSFSRNYDFKFRCLFKKFGKSKIYTARVMSAIGHSSGVHQMWCDDFTCFTRLSTKQFAAECLLLSVVERIDEFKNVMNYKPNPVFREPVGRAKKQIAPLCIQFHDKVEGKVLVGTPKPVLSAPKTRVDPNKVTAVDHKVSGDGSEFFVVKYANGSFKTVRNDDRAIANMFNATLERNTYYIPYECVTPNGGRFFNYQDKYCWLDAFMLAGKKIPDTLVPYPYLTIAYMKRCGLERVMKGRITIHSDMTGHFSVNRIKTLINWNDKCRIGVKLADEHDMSIKDIDVFFDEICDGIVKQTSMRSENDLMSNVVRRVSDKLNSSLSQARELQISVCTTSNQKKKITDMFPDLTIGFSDKSYSSHALFTGLRECENYYMAKKQGFANFIDAGGDVVNYVFKDCKNIHVCCPVVDAKDAQRHMTRSNLLDKIAGITETVDICDNLCQNCYVERPNIVAVQVYDMTLIDIARSLIAHKAKRFDFSLFIPPEIVDSNCDVTMFDGALKVLVDNDKVKYSYGDYGETYCHDVKNLRDILKTQLFSVDGIVFKKTLECSREGLHFYSVVPCVGFKNGKYEMTTHYRKTEIDKVLMILPSRNRFGVIENTRVKVDKSIVYHLLEYVMNTALRVDEKAQEYLSSQFRTRKSMTIKGGKVIQVPFELTFDHYPGFLGVILGEGVRLREKTTSMAKLSYYKHLMPSILSIIVAALHRLVVSVKQFAYEKTIDILKLVLAEDLITDMLYGDRRIFDIHETYEFTQVVNVIGDESNQRVLNESFNTFISESEERLNNLDVQLEPLDSRFTTDEQELMRDIVLGGGGSRPICDRTLEKIFIKLFNLFDSVLSNVEKAGKFAAFISQVAYQFLLRGKKAWDVVKDLIKTFIRAVMTGGKNLQSSTMNLLKKAAAKTKNKFLGVNSQLLADLERMLDEDEVDQLPSSTLCNHEETSDKDVGEIIVEAARQYPDFKQIEGVEVVQESEPITAGFTDEFQAQYPQFSRFICHGGFLRRCAKNLFERITNILKRFFIIVKDPKRAFHLIVNGIEDVLNFPSVIKSYWKTGLRYMYDSIDTIDGMTVIIQGVAFLGSNLILTLLTGNLHIIPNVVALLVFLGLKKFGIEKKYLVDSSVSSQVASSVLGLNHFGMLTIPIRFGISQYMMLKFKKKLLEEKVMPNTINQIVAKDIIHYKIVDRFTPRILRTCLGLSALVFLYMPRLSITMMILFVLIADFKKYLETFAVQANMTLSFSSVLSKTSKSLRLRNFKRILKEKFIRQQAEGDEEEMDGNVVISGQGAKISEYVSDDEIELDYAGKEIIKDNATLQNEKFVKFQDDKKAALWGDRSSCSESDTVFRHLEFSSLNPTSDRRYVECEVSFGLSNVILTYPSSSLNVFIETLDQQTNALGEFYYLESQRLCIEIGKLDNVIAKYNAKHSDRKTFKDVVWDMRNVIDDATLYISEDGKHWHRLKRGDSGNVQLEGSAKIDLNHHMTDLLHTKSGVQITSDEMLGMYTNNRLLALEKFMDGDMNFTTKKLSGMITFFNMPPGAGKTTTIVKKMKNDYTSRTRCLALTCTNAGKKEIIAKLKAEGIASAHTLVSTYDSFLMKGRDIIVDSLYCDEIFMIHCGQWVAVMNMISAANVECYGDKNQIPFINRVPNTTALHSKNFFMLFPMIHDNKSYRCPPDVCYLLSNLTDATGNKLYPNGVYSAGKNSDNIKSMSVEPMNGINEIKFDANEKYITFTQHEKEEVTRLGGKIKNTSINANTVNEVQGGTFKSVTLVRARQYDNPVYSNVNQFVVSISRHTDRMCYQVFPSKLNDFVGEKISALDRVSDYVVKEYKFKRRVDAYVLEVDSLQIPPTLSRPPSSHHKAVNEFMSLININLAAYDYIHRTLIYEFEQYELPPVDEVKLDVSKSRVYQPGEYLIPDILGKGERARPNTWKQVMMSLSHRNFSAPRINEYIDVVATAERLATSFMSVMSKEKLYESYEMIVPDLYSIDKWLENREGDKLRKLKRSFSHDLLVSQFSRMKMMVKGEMKPKMDVSSYTTYGPTSNIIYYEHVVNMFYSPMFLEVFDRIAYCLDERVVLYSGMNLDTLSKLIGSKLRYPLVEYNTIEIDFSKFDKSQGITMKMYEEIVYKFFKFSDVVYDNIKFTEYFCNIKSSCGVSLELGAQRRTGSPNTWLSNTIVTLGIILSVYSIDDVDLLLVSGDDSLIFTRKRLPNRAAEIDRDFGMEAKFLENSVPYFCSKFIVEDRGKIEVVPDPVRFFEKLSVPIRMEDFLYGELMKEKFTSHKDLMQGFDNDSVCVLVDAMIAKRYDIPEMASYAALCYIHCLCSNAFAFRKIYLDSFSVLI

SEQ ID NO: 590 - protein, 212 aa, Poa semilatent virus
KTLWEKSQFQTYVKDRNYGLEAYLLFQQKSGNCDTYGSNTWSAALALLDCLPLEDAHFCIFGGDDSLILFESGYPVPDPCTKLAGTWNFECKVFDFKYPLFCGKFMLNIGGKYMFVPDAAKFIVKLGRADIRDAEVLSEIFISINDNYCSYKDYKVLEELDKALVDRYRAPYSALSALTSLCYYIFDFQKFKLLFSCDGNFVDKKLSRDFDW

SEQ ID NO: 591 - protein, 1612 aa, Brugmansia latent virus
MAHTQTTMTNALLENARGTNSLVNDLARRRMYDIAVDEFNARDRRPKINFSRAISEEQTLIATEAYPEFQITFYNTQNSVHSLAGGLRNLELEYMMMQIPYGSFTYDIGGNFASHLFKGRAYVHCCMPNLDLRDIMRHNGQNDSVEMYVNRMQEKGKALPAFQKVAFDRYANNPEDVLCRDKFQECKHSKDSMHGGKTYAVALHSLYDIPADELGPALLKKDVNVCFAAFHFSEELLLENSSVTLDDIGGLFTREGDVLHFSFANEPTLNYTHSYSNILKYVCKTFFPASSSIVYMKEFLVTRVNTWFCKFSKVDTLYLHKSIKSVGCDSDQFASAMEDAWQYKKTLAMMNTERIMLNDSASVNFWFPKMRDLVIVPLFDISIDTGKRSRKEVYVNKDFVYTVLNHIRTYQAKALTYANVLSFVESIRSRVIVNGVTARSEWDVDKALLQDLAMTFFLQTKLSSLKTDLLTEKFKVGKKSLSEHVWDEISTSVGNLFPTLKERLLRRKVITSSAQALEIKVPDLYITFKDRFVSEYHRSVEMPNVDICGALEETQSLYSALSELSVLKDSTSFDVDKFSRMCKVLEVDPHLAAKVVVAVLSNDSGVTLTFEKPTEENVAKVLAASPHEPREEEIVFKTDTTSYIDNRIIAEERVIPVSGLTGGTSQEIVEVKEDVVSLSDYHNASVESIVKKQMVSMVYTGSLKVQQMKNYMDSLSASLSAAVSNLRKVLRDSIYGDATDGKYGVYDVLKKVWLMKPIRKGHAWGVVEENNGKMKVVLLEYADGNIVCGSNWRKIAVSTESVVYSDMAKLQTLRGVLKDGEVQVSSAKVVLVDGVPGCGKTKEILQRVNFDEDLVLVPGKEAAEMIRRRANASGIVVATKDNVKTVDSFLMNYGKRIGRQTKNLYIDEGLMLHTGCVNFLVLLSLCEKAYVFGDTQQIPFINRVQNFPYPEHFSKLEVDEVETRRCTLRCPADVTFFLNQRYSGQVTTQSPVSRSVSTELLQGSASLNPITKPLEGKVIVFTQNDKHFLEERGYRNVNTVHEVQGETFENVSIVRVTPTPLSIVARDSPHVLVALSRHTLSCKYYTVVLDALSSVVNDLSKISNYLLDMYKVESGVQXQLKVDSVYLNSSLFVQAPKTGDVQDLQFYYDKCLPGNSVVLNEYDAVTMRLSDNRLNVKDCVLDMSKSVALPRDEVPVLKPVIRTAAEKPRVNGLLENLVAMIKRNFNAPDLSGIVDIENTASVVVDKFFDSFFIKEKRKKKHLVEMSRDSLNNWLAKQESATIGQLADFDFVDLPPIDQYRHMIKAQPKQKLDLSIQSEYPALQTIVYHTKKINAIFGPLFSELTRNLLENIDSSRFLFFTRRTPEQIEEFFSDLDSHVPMEILELDVSKYDKSQNDFHCAVEYEIWRRMGIDEYLAEVWKKGHMRTTLKDYTAGIKTCLWYQRKSGDVTTFIGNTVIIAACLASMLPMEKVIKGAFCGDDSLLYLPKGCEYPDIQRCANMMWKFEAKLFRKTYGYFCGRYIIHHDRGAVVYYDPLKLISKLGAKHIKSYAHLEEFRVSLSDVATSLNNCAYYTQLDVAVREGHKTAPSGAFVYKCLVKFLSDKNLFRSLFTF

SEQ ID NO: 592 - protein, 1646 aa, Hibiscus latent Fort Pierce virus
MTTSTTDIKQQITNVRDDAAHGAASLIKGLATRRVYDEAVNTLTLLDKRPKFSFSNLVSTENAKMVTEAYPEFNISFVGNRNTVHSLAGGLRKLEMEYLMTLVPYGSATFDIGGNYAQHLLKGRAYVHCCNPCLDFRDIARNESYKDTVDSYLKRFTTPDCGWFSGAVRAITARPLPSFQKEAFERYRQVPSDVTCSQPFQDCAMRTPPNQDCFAISVHSLYDIPVDELGCALLRKNVKILYAALHFSEDLLLGATDAPLGNIGARFYRNGDEVTFGFDGESTLLYTHSFKNICGYITRSFFYAGAKYAYMKEFMVKRVDTVFCKFVRIDTQCLYKSVFHTQIDSDAVLEGMDSAFTARRQAAMLNAARPLFKDKAAFSVWFPNAIGKVLIPIFRGTTCLGAKIKMEKRLVDEDFVYTILNHIRTYTGKQLSYENVLSFVESIRSRVVINGANVRSEWNIPKSDIQDIAMSLFLITKLRTLQDSAVLSHFDIKKKGFFDCVRETIMEVTGSIFEPLTQICIDHGWFKIKEDKLKVEVPDTSRTFMSYMQTEFSESKAIESLDLWEYLDQSNQLYTHVSKLMERYSLPDFDVEKFKDLCAHLKVGPEVITAVIEAVMDKSLGFTVVGGKAEHQFTDEMKAAVAVSADYGQHCTDKKQVASAACKNEVTKPLKKQWVEKTTAALPLQATTEKTQHFHFNDEDESISVENLHLKRADTFKASKACMLYTGTVREQQMKNFLDYLSASICATISNIEKVLSDYWVSGTQTYQTYGLWDCKKKKWVLQPPTAGHSWGIASIKGEHFIVMLSFNENVEPICDSSWDMVCVSNDTKLFSAMKILENLTPLPVKESNAKITLVDGVPGCGKTAEILAKANFKKDLILTQGKQAAQMIRKRANAIDCTKPANTSNVRTVDSFLMNPKPFTYDTLWIDEGLMLHTGMVNYCVLLSHCTKCFIYGDTQQIPFINRVMNFDYPGHLRTIVVDDTEKRRITSRCPLDVTFYLTQRYKGPVMSTSSVTRSVETKFVAGPARFEPRATPLPGKIVTFTQADKETLKKKGYNDVHTVHEIQGETFNEVSLVRLTATPLNIISPESPHVLVGLSRHTNRLTYYTVVHDCITYSISELSRLSDYIFDIYSVEGQKAXQLQQNRLYIHKNIFCPTPKIGCMSDMQDYYDRCLPGNSFVLNDYDRVTMRLVDNVFNVEPCTLTMSKADPVDAEMKLASKNFLKPLIRTAVEKPRVPGLLENLVAMIKRNFNSPDLAGIIDTQMVAGRVVDKFFDDFFTDDGIKHIDSCKYNKYLYSKENLSVWYDKQQPQSVGQLANADFIDFPGVDEYKHMIKTQPKGKLDNSIQTEYPALQTIVYHSKHVNSIFGPIFSEYTRILLESIDTNKFFFYTRKTVDELEGFFSDLTDHSNMDVLELDISKYDKSQNDFHFCVEMKIWERLGIDSFLKQVWESGHKRTTLKDFQAGIKTIIYHQRKSGDVTTFIGNTLIIAACVSSLLPIKDCIKAAFCGDDSVIYFKKGLDFSCVQSNANLMWNFEAKLFKKTYGYFCGKYIIHHSGGCIIYPDPLKLIQKLGNKSLTSREHAEEFRVSLCDVSRNLGNCAYFDLLDKAIAEVFKQAGGGSYAFNAFWKYITNPALFKNLYDDSGPC

SEQ ID NO: 593 - protein, 1647 aa, Hibiscus latent Hawaii virus
MTDINQQITNVRDDAANGAASLIKGLATRRVYDEAVGTLKLLDKRPKFSFTNTVSTDQAKLVTENYPEFNVSFVGSRNSVHSLAGGLRKLEMEYLMTLVPYGSPTFDIGGNYTQHLLKGRSYVHCCNPCLDFRDIARNENYKESLDSYLRRFTTPDCGWLSAAYRKIAARPLPSFQLEAMERYRQNPTDVTCSLPFQQCKMQSPDGQDCHAISVHSLYDIPVEELGAALLRKKVKTLFAALHFSEELLMGATEASLGFIGAKFYRSGDEVTFGFEGESTLLYTHSFKNICAYITRSFFVADSKYAYMKEFMVKRIDTVFCKFVRIDTQCLYKSVYHCTNDAENFIKGMDDAFAVRQRAAMLNAARPLFKDKAAFSVWFPNSVGKVIIPVFRGSTVSCSKVKLDKLLVDEDFVFTILNHIRTYTGKQLTYENVLSFVESIRSRVVINGANVRSEWDVKKKDIQDIAMSLFLITKLRTVQDNHILKNFDIKSKSFFDCVKETITSVAGSCFTPLAQVCIDNNWFKLKEDALVIEIPELSQTFMSFMQKEFSESRAIESLDLWDYLDQSSQLYTHVSKLMEKYTLPDFDVEKFKDLCATLKVGPDVIATVIEALMDKSLGFTVVGGRDDKTRSAELTAAVAVSKDYGKGYHEEAFEQKPLASAAALNNTPMCSLKKEWVKKRVADMPLQATTQKVQRFFLTDEEEGVDMDDLHLMRTSKLKEKKTQKTCMLYTGTVREQQMKNFLDYLSASICATISNLEKVLNDYWVTGSQTYQTFGLWSCKKKKWILTPPSAGHSWGVASINSEHFIVMLNFDENGQPICDPQWDLICVSNDTKLFSCMRILENLLPLPIKESVATVTLVDGVPGCGKTAEILKKANFKRDLILTQGKQAAQMIRRRANSADVTKPANTDNVRTVDSFLMNPKPFTYDTLWIDEGLMLHTGMVNYCILLSHCTKCMIYGDTQQIPFINRVMNFDYPQVLRTVVVDSVEKRRVTSRCPLDITYYLSNRYGGPVMSKSDITRSADIKFVAGAARFEPQLTPLSGKIITFTQADKETLKKKGYCDVQTVHEVQGETYNEVSLVRVTPTPLSIVSPDSSHVLVGLSRHTNRLTYYTVIHDCITHTITELGKVSEYIFDMYSVEGQHSXQLTQNRVYIHRNIFCPTPKLGTISDMQNYYDRCLPGNSFVLNDYDRITMRLVDNCFNVEPCVLTLSRFDPVDSEMKLSSKSFLKPMLRTAAEKPRTPGLLENLVALIKRNFNSPDLSGIIDIDSVATVVVEKFFDDYFTTEGIVHINSSKYNKFLYSKENFSVWFDKQQTQSVGQLANADFIDMPSVDEYRHMIKTQPKSKLDCSIQTEYPALQTIVYHSKHVNAVFGPIFSEYTRIILESIDTTKFFFYTRKTVEDLELFFSDLTDLSEMDVLELDISKYDKSQNDFHFAVEMKIWERLGLDSFLKQMWESGHKKTTLKDFQAGIKTIIYHQRKSGDVTTFIGNTLIIAACVSSLLPIKNAIKAAFCGDDSVIYFKKGEDYANLQTNANLMWNFEAKLFKKKYGYFCGKYIIHHGGGCIIYPDPLKLMQKLGNKSLTSRQHAEEFRVSLCDVSKNLGNCAYFDLLDKAIAEVFKEAGGGSYAFRSYWKFITNPRLFESLYVES

SEQ ID NO: 594 - protein, 1639 aa, Hibiscus latent Singapore virus
MTTDIKQQITNVRDDACQGASSLIKGLATRRVYDEAVQTLTVLDKRPKFTFSNMVTADQAKLVTEAYPEFNISYVGNRNAVHSLAGGLRKLEMEYLMTLVPYGSPTYDIGGNYAQHLLKGRSYVHCCNPCLDFRDIARNENYKETLDSYLKRFTTPDCGWFSAACRKVTARPLPYFQQDAFERYRQNPKDVTCSEPFQDCCMQPPSNQDCFAISVHSLYDIPVDELGAALLRKNVKTLYAALHFSEELLMGATEARLGTIGAKFFREGDEVTFGFDGESTLLYTHSFKNICAYITRSFFYAGARFAYMKEFLVRRVDTVYCKFIKIDTQCLYKSVFHTDIDNENMIKGMDEAFMYKREAALLNAARPIFKDKAAFRVWFPNSVGKVIIPFFKGSSCTSAKVKVKKRLVDEDFVFTVLNHIRTYSGKQLSYENVLSFVESIRSRVVANGANVRSEWDIPKSEIQDIAMSLFLITRLRTLQDSNVLQQFSVKGKSLTDLVKEALGGLVGSMFEPLTQVCIDRGWFKLAEHTLKVEVPELSQTFESYMQTEFSESKAIEALDVWSYLDESNQLYTHVSKLMEKYTMPDFDVEKFRELCALLKVGPNVISTVIEAVLDNSLGFTIVGGKPEHQYSDEMKAAVAVSSEYGKGKEYGNIAAAASTYTPEGPLKKEWVKKNAVQMPLQATTEKVQRFHLSEESEHINVENLHMVNTSVFTKAKACLLYTGTLKEQQMKNYLDYLSASICATISNIEKVLHDYWTTGTQQYQSYGLWDVKKKKWVLCPPTAGHAWGVAAIKGKHHIVMLNFDGNDQPICDKEWDLVCVSNDTKLFSTMKILENLQGCKIQEPKAKITLVDGVPGCGKTAEILSKADFKRDLIITQGKQAAAMIRKRANANDPTRPANNDNVRTVDSFLMNPKPFEYKVLWIDEGLMLHTGAISFCVALSHCEQCYVFGDTQQIPFINRVMNFDYPKTLQTLVTDSVEKRRITSRCPLDVTCYLAQRYKGPVVSTNNVERSLDTKLVAGAARFEPQLTPLPGKVITFTQADKETLKKRGYQDVHTVHEVQGETYTEVSLVRLTPTPLSIISPDSPHVLVSLSRHKNRLVYYTVVNDCITYAIGELAKLNNFMFDMYTVENQKAQQLQQHRLYIHKNIFCPTPKTGTISDLQEYYDRCLPGNSFVLNDYDRVCMRLVDNTFNVEPCTLTLSKADPVEAEMRLNSKNFLTPLLRTAVEKPRVPGLLENLVALIKRNFNSPDLAGIIDTKQVATNVVDKFFSDYFTVEGLDHINRCRNNKFLYSKENLSVWYDKQQPQSIGQLANADFIDFPSVDEYKHMIKTQPKGKLDCSIQSEYPALQTIVYHSKHVNAIFGPIFSEFTRIILESIDTNKFFFYTRKTVEDLELFFSDLSDSSDMDVLELDISKYDKSQNDFHFCVEMLIWERLGIDNFVKSIWETGHKKTTLKDYQAGIKTIIYHQRKSGDVTTFIGNTLIIAACVSSLLPVKSVIKGAFCGDDSVLYFPKGVDLTDVQANANLMWNFEAKLFRKKYGYFCGKYIIHHSNGCIVYPDPLKLIQKLGNKSLTSREHAEEFRISLCDVSKSLGNCAYFDLLDKAIAEVFKGAGGGSYAFRSYWKHITNPGLFKTLYDES

SEQ ID NO: 595 - protein, 2601 aa, Rubber tree latent virus 1
MALSGILSLDPALQVDFCEVTTALDDLSPNVLYPHTSYQLCTEPELLWGRYSFCRLTKHYFVSKLVDSYKTLVCVKNAISVNGVRDGAFFSYKLFPGDCVSLDRVESLSYSPGIPFSMCDFIVLRNQLPLYINTSNALVTSNGYCYLHLFDSPQRDCTYLFAIAQRFGKYPYFKDVYNHLHSLNVREVPVIVKVERDLYHVFPQQRRQLSEYSYILDLPGVHYIGGDTSGFNLARSAQPMADVSVHLSPESTALLDVVGLVSEESKSSFVKSLLLDNHCFTRKTIDEKLSKDLSNVRGKRGRPSVVIHNVLSHEEFKHLESDYPEFTIKFEQDVKTPHAYAAASRKLAHSLIFKEIGFRPDRVMSNRHMVDVIDIGGNWYSHIVADRPRVHCCCPILSVQDDVRETTRRRFFSELSRPVEPKVEREIRKLRSIEYFENPKTRWRIRCLKKAQHCSVTAPVATMIHSAYDMTTEEIADSMTRHKCAFLMGVIMFTPEIIIEEKGILPWLDCQFDRSRGDGMIHFNFRGEASFGYSHKWENYRELLSKKVWWNSEKSQAYVCQLLLNRTGEQYFSVTLLNNPQIPHSKLNHRVWFDNSEQLVVKFWSFDVRASTLQKAMVPKQFICDRWTADKIMTYALRQTTEAKFNAAEIFSYAVAIDSKVIVDGTTVMRGKQTKPVELFDLAHAIYIQAYVQRYNSGRVDKAVLDGIKAERELSSAGLFKKFTMLFRKGGSNGYLTRFHDLLNHWVVLPELFPVSISKAIEYVQFDEIVEPFLNPPEVSQELERGPLRPEPGAQIRATLHLAESDKESEDEDEDDKGSNVSWGGLLPTPSRGEKRKSGKPLDTLSQDSGSEEKQDQGEKYQWKIKDIQEFSISAETWSLDSCRNFYLVFRDPVKELHLHRGTRLLIHSEVKSQLLPRSLVVELTPCSPVPIEEIVDGFRLLSKVEIRDLFELGLIVLNEDLFSKQSHGPYKKGLTFEEFVQSLLPLRRAVKVGRCVGKTVGAALDSFAHAVLPLAGGGTTVDSTYNKALRVPKKIPTLHAAVALKNPLIRSSKEEQVVSTDDITQSTKGKAVVSAEVKEKKSEIADSGKEPQRIQEVVEIKSSDDERSTTSEVQPMIISSDSEEEHIIVKPSQELVVAEQKAVFYGPEIPPENSSWQVPINMGKCQCGDHWRISVKADGNCFYYALKRLLPFLGSVEEMKEILKEGLHEFDYGVARYLRRILDIPFHYAEPACVQLAANVFERDLWIHESFDSPEIQIVKSSKPAKGHLCILLERAHFTPLLCHKEKVLWSEIVDVPSTTSESDTSIQERESRREKEKGMEVIQSSVSNQERSYYYQIEQLSNSMSLFKQLHRTKPTLIKNFPTDSMVFPFLEAKRLRRRKALFYCANKDWVYGHDKVIYQNGGWPEDIARLAERFRCNSVLIQIYEKGATIPPHKDDEAVYDLADNPVFTVNFLGSAKFSFGENKKELHSVDLTAGDLLVMPPAYQKKHFHSVESLSEGRISLTFRRQKRNLPGYGQTTVTEEWQKKQKVEQETTEVVKEISGGGTWGKTRKRSTIKRSHTKGLHLDKFSNTKTYSEIYASELKHLSEIEQRRWAEFSPKLNNNTLKNEVHRNLVNALGEVMEYWRVHDEVLRRRLRDIYVRIPTSIIDTSSSTVAQLKERGPNKRDVEAALKRNGIKTFEVSIWDTHHNRWLWQAEGIHDYEGCFDGESILEIPMELKADLDKTKDPREYTSLFDMELPFRWLLLTKETVLLQSGKFYKVAMNEVKQATDWVPPLIDFVQGVPGCGKTSYILRNHKRSVWPPFKKILGEKKYTRKPSVLGDLVLTTTREGAHDIRKRLRDSGEEVYDKQYRTLDSYILNCSIPFEEVWVDEALMQHAGALVLVALKTRCKVLHLMGDRAQIDFIPRMGDVTLRFCSMGDLVPTSKILNTTYRCPVDVAAILSEHYEQGMVSTSKVRESMKVERITDAGQVPKEDDATYLTFKQAEKFELVKKGFKNVHTIHEFQGLQTDKVYIVRTSHKPAEEIYSSMGHILVAMSRHRELLVYFTPVLLDSLAKKMLKRPTAAQLQAASLQVDVPSKSTRGGFSTLFPVAEEKKIHSSTPLSTSPIESLQTWYDDTCPGEATFVGIYDQQMVFDADLAIAVGKSGIDVSRVRPLKNSRPTLRPNLRTSMQPIRRSGVKETLLAYFKRNANVPSLSGDVDPEELSQRMVEIFEESYLDKNLKTHYASMRLERIGCNSKRIQKWMDGHSDFTSKCEWPPSIYEHANDLYRYMVKRTVKPAFDGTNMSEYKAVQTIAYLAKDVNAVFCPIVREMTERLQSVLDRRFILFSMMSPEEFASRMETLIEPRNVHKYFKKEVDFSKYDKSQGEVLHLFEKKMYARLGFSGELADLYWAAHVYSKYKDFDNGFDAGIWFQRRTGDAATFLGNALVVMGVLACVFNMQETHAGAFAGDDSILFSTEDIYSIDKSFIASQLFNLESKFFTFKSVYFCSKFLLNVNDRFVFLPDPMKLVTKLGRTDLVDWIHLEEYYTSIKDLCKEYSNFCIEPSLSAALKERYPRTHNSSGYLISALWSVLKDFESFSQLFSEPPEGLLIDPSRPNL

SEQ ID NO: 596 - DNA, 2496 bp, Spring beauty latent virus
  source 1..2496: mol_type = other DNA
atgtctaagccatacgttcctgatttcgaatatcagatccctagtttccaatggctgattgatgactctttgaagagagagccagaagtcgcccttgatgtagaaacgggaatggacgttaataaagtttacctacctgaatccggatttgtagcggatggctcattagctagctatatcctagctgttcaacctgttgttaagggtgagggttcttttgaaccaccttttgaccaggcgcgctggggtgtgtgctgcgaacatgccgcgagtgctgctgagatttttacagaccgtcatttgttaccaacggctgagattgctaggatgttgtatttagacattccaggcagtttcattgatgaatctgaagaagatgattgggtcgttgaagatactactgacgggtatggtgagtatcggcactctgatgaagacgctatacaatcgccgcttttctccgcggagttaacgcaagaaattgctgaggagaagccatcactctcaatggatttaactgatgaaaatcatgatgagaggcagctgtctagtggccctagtgagctgacactaggagaccgatacgttgtgacaaatgaagagtttaaaatattggattctgattatggcgttactcttaatttgttaaaccctgttgagaatagggttgggcttgtagaagatacattgcctacgttagacagcgactcttttaaggagggcccgaaataccttgaaagagtttctttgccccgtttggaggcagccggtcatacgatccttcccactcatgcttattttgatgatagcttttatcaggctatagaagagaatagtgacatgtctcttgattttaatcgtatcaatttaaagcagagtgatgttgactggtatagggatccggataaatattttgaaccacacctgaatataggatcctttcagcgtagggtcggaactcaaaagactgtgttaaccgctctgaaaaagagaaatgccgatgtgcccgagatgggcgatgttgttgacattaagtctgttgccgctgacgttgccagaactttcttgaaaacgttcctgaataaggacgggaaagattgtttactggctagtatggacgttttagctaagggtctcgattatcataataaatggaagacccaccgggatttacagggagttacattgtgtactgagcagaatttgcagcgctatcaacacatgataaaaactgatattaaacctgtcgtgactgacaccctgcatatagaacgggccatagctgctacaattacctttcatggtaagggtgtcactagctgtttctcaccattcttcacggcgtgttttgagaagttctccctggcgctgaagaagcgctttatagtacccatagggaaaatctcctccctagaactgaaaaatatcgggctgaataataagtggtttcttgaagccgacctcagcaagttcgataaatctcaaggtgaattacatcttgaatttcagagagagatattgttgtcgctggggtttcctgccccgttaactaattggtggtctgattttcatcggtcgtcgtatttatcggacccgcatgctaaagtttcaatgccagtttcctttcagagacgtactggcgatgccttcacttatttcgggaatactcttgtcacaatggctatgattgcttataccgttgatctgtcggaagcaactgccatattctctggagatgactccctcattatttctgataagaaacttgagttggatactgaagtcttctcttctctgtttaatatggaaattaaggttatggaccctagtgttccttatatttgtagtaagtttcttgttgaaactgaaaatgggaacctggtgtctattcctgatcctttgagagaattacagaggatggctaagaggaaaattttaaaagataaagaaatgcttaaagcgcactttacgtcattttgtgatcgtatgaaatttatagagcatattaatgagaaatcaatagagatgctctgtaagtttgtttctttgaaatataagaaatctatagattatgacgttagagttgccttagcagcatttagttattattccgaaaatttcttaaggttttctgaatgttatgtcacagaaggcagtaatgtctttttgaagaaagaccctataagaaatgttttaggtgaggaagaacccgactatcatgataaagattcgtcttggtttagagattggcgtaatactagtttcaaaccgtctcgattattgaataaactgggtctttattctgttgaagatccgttgaaaaatgttaagtctgatagaagggttatggaaaaatgcatgaatacttccctcaaattggcctatgataatcggtcgttacagcgcatgaggttgaagttggattatttaaaagacgggattggtgatattaattccgttgaggtgttgaaaaacacctttgtgggcaggacttaa

SEQ ID NO: 597 - DNA, 1784 bp, Ageratum latent virus
  source 1..1784: mol_type = other DNA
atggataaaactaaatcagatatcatagttttcttcttgagtaaccgactgaaggtgttccagtcgttcgacatcgaacaagacgattacaatgattgggtaaaattgttcttgttcaaattcatcgtcgagcatactgctcgttacgattttgccactatacatcaaacttttgtgatggttatggggaacctcggaattgttaacgatgaagagatcgaagacgaagatgatggctatgtccacgatatagatcctttttatcttccttatgacgatctcgacgttgattacacttccatccgctgtgagattagtgatgatgttgctcccgatcttccacaagtatctgacttggagaattacgttgaaaatgtcagtcacatccctgaaggtacatcatgggctagtgtgtctgacacattggaagaattcagagaagagtatcaggatttaaaaaccgattctgtttcctttgaaattcccgagacgtcagttctcaattgtgatgatgacgatggtcaactttttgacctcgaattgatcgatgccggtgagtctttggctcccgaagtttctgctgatgctgatattaggaaatccgtgtttatttcctatcaaaccggttcaaatctttcgtctaagtggagacctaagattgttcaggttagaccagatccatctgtaattcaaaatgcagttgacgagttatacccgaatcatttcagtgttgatgaccgattctttcaagagtgggtcgaaacacatgatattgatttggaagtttccaactgcaatcttgacatgtccacgtttaacgactggacaaagggtgttgacactcgtttgtctccacacctacaggttggtgggttatcacatcgtgtactgactcagagggaagcgttaatagccataaagaaacgcaacatgaatgttcctgagttgcaaagccaatttgatcatgacaaagtgctgaatgactgtgttcagagatttctcacacatgttattgataagaccagattgtcaaaattgatgccgatatctggtgaagagttattttacttcaaccagtatgtcgagaataaaaatcctccactttcagaatatcgtggaccaattcccttggccgctcttgataggtacatgcacatgatcaagacgaccttgaagcctgtggaagaagattctcttcacgttgaaagacccatacctgccaccattacatatcataagaaaggcgtggtcatgatgacttcaccctactttttatgtgcaatggtgagattattatacgtgttgaagagtaagtttacgattcccacaggtaaataccaccaaattttccagatgtgcccccaacgtctgaagaactccagtttctttaaggagatcgatttttcgaaattcgacaagtcacagggtcatttacaccatgatatacaacagaaattgtttatgtatcttggtatgcctcaacatgtgattgatacgtggttcaatgcccacgaagtcagtcacatatatgaccagaattgtggaataggtttttccgttgatttccaaagaagaacaggtgatgcgtgcacttacttaggaaacactcttgttacgttgagtgtcctgagttatgtatatgacctcagtaaaccgaatattctattcgtcaccgctagtggagatgatagtttgataggttctttaactgagttgcccagagatagagaggatttgtgtgtttccctctttaactttgagacgaaatttcckcayaatcaacc

SEQ ID NO: 598 - DNA, 2744 bp, Ageratum latent virus
  source 1..2744: mol_type = other DNA
atggataaacaaatcaattttacctcacccgctaccttacgttctaatgtcccggctattgatatcaataacttgattaaaagttatattgaacatgtcaaagctgatgagattacgaatgtgggacggtttttgggtgatgttgccttgcgtgaaatcaaatctcaagttgacatctcaaatggtgacttccagaagttgaatgtcggtttccgactgactcctgatgaaaagaatgctttgaaatctagctttccaggcctcgagatagttttcaaagattcttgtcaatcctcacatagttttgctgccgcacacagggtgtgtgagaccttggatatatataagcgcttcaacacaaaaaccgagaagatcattgacctcggtggaaattatgtcactcatgccaagcatgggagagcaaatgttcattcttgctgtcctattcttgatgttcgcgatggggctcgacatactgatagatatatatccttagctgccgctgtggagaaacatcataaggaacttcctgttgatttttgttgccacaagttcgaagattgcggtgttcaagcaccgtatgccatggcgattcattctataagcgatattcctattgccactgttgcaaaacattgtgtgcgtagaggtgttcgaaagcttatagcttcggttatgatggatccatccatgatgctttatgagcgtggtcatatacctttactcaatgttgaatgggaaaaagaagacgttgaggatcagaacggtgtcaaaacgctgatccattttcattttgtggatgctccaggtttgagttattctcatgacttttccatactgtcacaatatatggtcaccaatcaggtcatagttggtagtggatactcttatagagttgaacgaacagctgacttgaacggtgtcttcattgttgagatgacacttagtatgacggatgggatgactctcaaccacatgaaacagctgactgatatttcttgtgcgtggttgtcaaagttaaggaagaaagtcttcgttaaactggcygtgccagtttcaaccgagtggttcactgaagattttgaaattcggtgggcgctcatggatgagtctcttgtgagatatgtgaccgaagctgcattccggcaattttctgrgagcaaagatgcgaagactattgtgcaatacattgccacgatgttatcctcttcctcaaatcatgtcgttataaatggtattaccatgcgtagcggcagtccgattgagattgatgagtatgttccgttggccgttaccttttacacaatggcagcctggagatacaaaatgattacccctggaattgatgccgtgacgacgagagcgcgtaagaacatagattatttgaaggatacaggtggtgaaactttgtctgatttattagtcgaagttcaacaatctgttttaccaaatgatgattytggtctgaagaattttgagaaaataccagacatcatcaaatctgtgggtcttagagctattaagggaaaatctgtcacgaagatcggggatgataaaacccttttgaaatcccacagtattttcaaggaagtgctctacgagattaagcagttctttggtcttactgtaactggatcagattttaattttgttgaaggaacaccagcaaatttgaagtctacagttgtttggaaagttttcgagaagaacatcaactttccctcatgtttagacgtgtctgaatgttcgtacaatttgatgaacaaacatcttgcacagraagcgtccgatgaggagaatgatcggaaacaaaaagatttcaaggatgccagagacaaagctctgattacgatcgccaaggtacttgagaagtcagacgtacccgatggattgcttccaattcttgatctttgtgatgtaaagcaagaattgatgaccgcccagaattccctgagtttgactccggaggccataaacacgactgcagcttgcgccagtagctccactactgtgaatccctatgccgaaagtatcaaagaagctattcattacttcaatgaactcgagatggtaaacgcaagaaatcttaaagctttaggtggttacatcggttggaaatccgccgaagtacaaacatatcgagctttgaggggcaggaatgaatcagtcaaagtgtttataccgtttgaaaacaaatggtatccggatgacaagggtctaaccacttacgaaagggcaatgtcggaagatggttatgttactcttcattgggatgttgatggaaaatcccttaccgatcgatgtaagaaatctgttagcaggtttaatgcattagtggtcgacgaatcttgtattttcaattcaggccagcgaatgatacccgctctggaatccgctttgaaattgaaaccagtgtttaaggtgactatagttgacggcgttgcgggttgtggtaagacgacccacttgaaacgtgtttcacggttcgacgctaatccagatcttgtcctaaccagtaatcgaagttctgccgatgaattgaaggacacgttagactgtaatgaagcgatgaaataccgcatcagaacagtcgatagttaccttatgttgaagaactggttttctgccgataggttgttattcgatgaatgcttcttgacgcatgctggttgtgtttatgcagcagctactttggctcaggttaaggaagtcattgctcttggtgayacmgagcaartaccytt

SEQ ID NO: 599 - DNA, 2373 bp, Ageratum latent virus
  source 1..2373: mol_type = other DNA
atggataccgttaagtcagaacttattctcatgtttttgagtaaccgactgagattttaccagtcgtttgaaattgaacaagctgatatgaaagattgggttaaaattttcttgttcaaatttgtgatcgaacacactgctaagttcgattttgccactgtatttcaaacctttgaaatggttcttggcaaccttggatatgtagttgacgaagtcgaagaagatgatggctatgttcgtgacatagatccgttttaccttccgtacgacgacttagacgtcgattacacatccatgaggtgtgaaatcagtgatgatattcccgatttaccgtccagttctgacgttgagaactatgttgaaaatatcagtcacatccccgagggcacgtcgtgggctagtgtatctgatacgttggaagaattcagagaagagtatcaggatttgaaaactaattctgtttcctttgaaattcccaacgacattgttcttaattttgatgacgatgatggtcaaattaatgaccttgaaattatcgatgccggtgagtctatggctcccgaagtttctgccgatgctgatattaggacatcatgttttgtgtcctatataaccggttctgatcttaagtctaagtggagacctaaggtcactcaggttagacccgatccttcaataattcaagatgcagttgatgaattgttcccaaatcaccattgtgttgatgacagattctttcaagaatgggtagaaacacatgatattgatttggaagttaccaattgcaatttggatatgtccaattttaatgattggacgaaaggtagcgatacacgtttgtgtcctactcttcaagttggtgggttatcacatcgcgtgccgactcagagagaagcgttggtggccataaaaaaacgcaatatgaacgttcctgagttgcaaagccaatttgatcataatacggttttgaatacatgtgttcagagatttctcacacatgttattgataaaactcgtatgtctaaattgatgccgatatctggtgaagagttatattacttcaatcaatatatcgagaataaaaatcctccactttccgaatataaaggccccattcccttagttgctcttgatcggtacatgcacatgatcaagacaactttgaagcctgtggaagaagattctttgcacattgaaagacctgttcctgccactatcacatatcataagaaaggtgttgtcatgatgacctccccgtattttttatgtgctatggtaagattattatatgtgctgaagagtaagtttactataccaacaggaaaataccaccaaatattccagatggatcctaaacgtctgaagaattcaaagtttttcaaagaaatcgacttttcgaaatttgataaatcacaaggtcatttacaccatgatattcagtggaaattactgtcttatcttggtatgcctgaacatgttattgacacatggttcaatgcccatgaagtcagccatatctatgaccaaaattgtgggatcggattttctgtcgatttccaaagaagaactggtgatgcctgtacatacttgggaaatactcttgttactttgagtgtccttagttatgtatatgatttgagtaaaccagatatcctttttgtaactgccagtggtgatgacagtttaattggatcattatctgaattgccaagggatagagaggatttgtgtgtttccctctttaactttgagacaaaatttccacacaatcaaccctttatatgttcaaaatttctcctggtggttgattgtgatgatggatctgaggaagttttagcagttcccaatcctctaaaacttctgcaaaaattaggtcccaaaaaccttcaagtcacagtccttgatgattattaccaaagtttatgtgatattttgtgggtttttgaagatgctgacatttgtaagcgtgttgcagatctcgctgaataccgcaggtttaaaggcctgcacaaatgtcaatttctggagtccgctttgttgagtctaccaagtttagtagcgaatagattaaaatttattagaagaactgtcaatttagagagttcaaaagtttgtattcgcaatgatgtttattccgatcttgttactagtcttgactcacgggctaaatgccgaacttatgatgccgacggttcaaaccgatcgaggaaacgtgaaccctggaagggaggagaaacccgaaccagaggtcgtgctgaacccggaggaaactgtaaaaataaccgcagggtcagttccaacgtcacaatacccaatgagtcaaacattggaagaaagaagccctccaggaaaggagggttcaaattgcattga

SEQ ID NO: 600 - DNA, 3294 bp, Ageratum latent virus
  source 1..3294: mol_type = other DNA
atggaaaacgatcaatttaccccatctagttcctcacgttctggatttccagctattgatgtcaataacttgattaaaagttatattgaacatgttaaagctgatgaagtcaccaacgtgggacgatttttaggtgaggtagccttgaaagaaattaaatctcaagttgacaccactaatggtgatttccagaagttaaatgtcggtttccgcttaactcctgatgaaaagaatgctttaaaaactagtttcccgggtcttgaaatagtttttaaagattcatgccaatcttctcatagttttgctgccgcacaccgtgtgtgcgagaccttagatatatacaaaaggtttaatacaaaaactgaaaagatcattgatcttggaggtaattatgtcacccatgctaaacacgggagagcgaatgttcattcttgctgtcccattttagatgttagggatggggctagacatacagataggtatatatctttagctgccgctgtggagaaacatcataaggaactccctgttgatttttgttgccacaagtttgaagattgcgacgttaaagcgccgtatgccatggcgatccattctataagtgatattcctatagccacggttgcaaaacactgtgtccgtagaggtgtccgtaaacttatagcttcggttatgatggatcctgccatgatgttgtatgaacgtggtcatatacccttactcaatgttgattgggaaaaggaagacgttattgatgggggtacgtcaaaaaccctcattcatttccattttgttgatgctcctggtcttagttactcccatgacttttccatcttgtcacagtacatggtcactaatcaagttatagtcggtgatggttactcatatcgagttgaacgtaccgctgacttgaatggagtgttcattgttgagatgacaattagtatgacggatgggagtactatgaatcacatgaaacaattaactgatatttcatgtgcttggctggccaagttgaggaagaaagtttttgttaaacttgctgtaccagtttctaccgagtggtttaccgaagattttgaaattcgatgggcgctcatggatgaatctttagttagatatgtaactgaagctgcttttaggcagtattctgaaactaaagatccaaaaactgtcgtacaatacattgctacaatgttatcttcctcatcaaatcatgttgttataaatggtatcaccatgcgaagtggtagtccgattgctattgatgaatatgttcctttagcagttaccttttatacaatggcagcctggagatacaaaatgattgcccctggaattaatgctgttaccacaaaagtccgtaagaacattgaccaatatatggatagtagtgatgaaactttttccgatttattggttgaagctcaaaagttactgcttcctgatgatgatttaggtctgaagaactgtgaaaaaattccggatcttatcaagtctgctggtcttaggactattaaaggtaaatctttaaagaaatctggggatgataaagccattttgaggtctcacagcgtctttaaagaagtgctttatgatattaaacacttctttggacttactgttactggatcagatttcaattttgtggatgggacacctgcaaatttgaaatccaccgttgtttggaagatcttcgaaaaaaacgtcgagtttccttcatgtcttgacatttctgaatgttcttatgatttaatgaataaacacattgctcagaaatctgttgacgaagaaaacgaaagaagatctagagacttcaaagatgccagagataaagctctgattaccatcgctaaggtacttgaaaaatcggacgtgcctgatggattgttgccgattcttgatttgtgtgacgtcaaacaagaattgatagccgcccaaaattccctgagcttgactccggaggccataaacacgacagcatctcgtggtgacagttccattactgttaatccctatgccgagagcattaaagaggctattcagtactttaatgaacttgagatggtgaacacgagaaatttaagagccttgggcgaatacattggttggagagccgccagtattcaaacttatagagctctaaaaggtaggaatgagtctgtcaaagtgtttataccatttgaaaataaatggtatccggatgataagggtctaaccacttttgaaagggcaatgtcagaagatggttatgttacccttaattgggataatgatggtagatcccttaccgacgcctgcaggaaatcgattagtcgttataatgcattggtagtcgatgattcttgtatttttaatgctggccagcgaatgatacccgctatggaatccgcattgaaaatgaaaccagattttaaggttactattgttgatggtgtcgccggttgtggtaagacgactcatcttaaacgtatctcaagatttgatgcgagtcccgatcttgttttgactagtaatcgaagttctgccgatgaattgaaagatacgttaaactgttgcgatgcgatgaaataccgcattcgtactgttgatagttaccttatgttaaaatcatggttttctgccgacagaatgttgttcgatgagtgcttcttgactcatgctggttgtgtttatgcagctgcaactttagctcaggtgaaagatgtcattgctctaggtgataccgagcaagttcctttcatttctagattacctgagttccgcatgcaacatcataagttagtaggtaaaattgaaactcaaactactacttatagatgtccaagagatgccacgtattgtcttaagaagattttttacaagacaaaatccgtgaagacagcgagttatgttgatagatcgctggaattatgtcctattaattgtgcagtccagataccttgtgaaagtgatactttgtatatcacacacacgagagctgataaagattctcttcttaaaatacctgggtttaagaaagagaacataaaaaccacacatgaggctcaaggagaaacctgggataaggtggttttattccgtttgtcaaaaacgacgaatttgttgcattctggaaaaggtcctgatttaggaccctgtcacaatttagttgccttatctagacatcgtaaatcttttaggtattatactgttgcccctaatgatttagatgatcagattgtgagaagtgttacaattgccaagactctgtctgatggagatcttgatgcagttagattttcttctaactag

SEQ ID NO: 601 - DNA, 3252 bp, Fragaria chiloensis latent virus
  source 1..3252: mol_type = other DNA
atggattttcaaaatctttcgtcttctgctgtcccttctcctgtctctgtacaagatttattgtcagagacattgaagagacaatgcaccgatgagaccactgctatcggtaagctttttgccgaagaggcaaaaagattggttacccagagttttggtagtgatgctgccaaacctttgaatgtttcgtttcaactctctgctgagcagcagagtttgttaaaacgaaattttcctggacgtgttattcagttttccaatagttcatcgtcgtcgcattcatttgctgcggctcataggctgttggaaactgactttgtttactcttgttttggtaacaagaatgccaccattttggacttaggtggtaatcatgtgtcccatcttaagatggagaggcacaatgttcactgttgctgtccacttcttgacggcagggattgtgccagacatactgaacgtttgatttcatactcgacgttcaaagcttctcatcctcaagaaatccatgatatgaatttttgtgaaaatgcttttcagcattgtgatgagaaggctgattttgcaatggctatacattcgacgtctgatttgccgttagatgttttatgtaaagcgttgctgaaaaagggagtaagaaagttcatctgtacaataatgatagaccccgatatgttggttaaggatcggggttttattgaacattttaatgttagttggactattgacaggtatgccgatagaatctggtttgattttaacgatgcaccctgtttggggtatgatcataagtattcgacacttatgcaatacttgacctataatgcagttgacttgggtgattctgcttatagagtcgaaaggaaacaagatttttccggtgttatggtgattgacataacccgatgtgctggtttcgtccccggtataccacttaattgtggtcgttcctgtgcttggtttaccaagatcaggaacaagaccattgtcaatatttctgacattagagatgaagttaacggaattacacttatccaacgaggtgtcctgattgatactaaggtgttgatcagagtctgtgaagcttctttccgacaatttaagcccaatgtcgaagcccgggttgccgtgcaaaacatttgcacgatgttgtcgtctgccaccaatcattgtataattaatggtgtgacgatgattgccggtactcctttgagtgtcgatgattacgttccagttgccactactgtttaccacagagtgaagaagatttatgaatctgttggaacagttctgaacaatatgaatacctaccgtgatcttctagcgaaacatagggctatgacggtagatgatttgctcaatgcggatttttccacgcaagccgaagctgggttgttttctttactcagaattttggcttttcccattcgattcgttgcaaagttaactgggttacttccacctggaactttgaccgaagttgtggggaaaactggatcggttgagaggcacacgtttgtgaggaaatggggtgccacgtttttaaatattgctagacatattttgatggagtatcaagttatgactccttacttggctgatccagagttgtttgtgccacttgagtccgttatgcgagctcattgtgatgaattcggtcccgtcttacagattccagaaatgttgtctgtgaggggattgaaaaattccatcgatgagaagattgccagtgatcgagctgagatcattgcggagaagctcgaggccgataagcttagagctaagcaggagaaagcgattttgactgttgccgcttggattgatgctcatcctgatggtaaggttccggtcggattgggattatcgtctgaggatggtaaattcttgtatccaaaacccacgaccgaggtggttactgaagtcggtgatgatgttgtaaaccctcatgcggactcgattaaagaagcaataatgtatttcgagaccatgtcggctactagtcaatctactttgatagaacttggtaatcattgtagatgggctaactatgggtttaccaccgtgtgggctggtgatgaaaacagacgtatataccaacctagtttaaataaatggactggtccgatgtcagtcagaaatcctacatatcgcggtgaatatgagcgcggtatgactgttgatgggtacgttactttacagtggaaggatggttccatcactgaagaatgccgaagatcacttttcaaatatgaaatagtgatcttcgatgattcgtgtatttttgcagcggccgaacgaatgataccaagtcttcgtaaggcactgaccatttttagtgactttagtgtcactattatggatggtgttgccggttgcggaaaatccacaagtattgttcgaaacgctagtctggacccaaattgcccagatctcgtcttgagcagtaataggtcttcagctgaagatcttagtatcaagataccaggtactagaatagtcaagtctaggtatgttaggacttgtgactcattcctgatgacaaattcaccccctaccgcgaagaaaatgttttttgatgaatgttttatgcagcatgctggttgtatttatgcagctgctactttagcgaggtgttctgaggtgtatgcctatggtgacaaggagcaaatacccttcatttcaaggtgtgattctataagattcacacatgagaaattggagggtaaggtggtgcagcaacttgttacatatagatgtcccgtcgacgccactgcggcgttgtcgaagtttctttataagaagaaaaagaacattgtgactaggcgcaatgttgataggtcaatttctattgttcctataaatgctgtcagtcaaattgaaattgatgacaaagccgtttacataactcatacacaagccgagaagaaggctttgcagagtgctgacggattttcgcgtatgaaagtattttctacgcatgaagctgagggaggtaccttcgacaaagtctattttgttagactgtcgaggacgtcaactcatttgacagctggttcccatcctacaatgggagcatgtcatgggttggttgcactgagtaggcataggacggtatttagatactatactacggctactagtgattcgaacgacatcctttataaggcttgtcgttatgcatctgcgagttccgattctgagttggaatttgctagatatgttccaccaataggtgaagttataaagttgtag

SEQ ID NO: 602 - DNA, 2361 bp, Fragaria chiloensis latent virus
  source 1..2361: mol_type = other DNA
atgttttgcccaaaaattttatctttcgttccttcttcagaaccatgggttggttctgaaagtttagatgccagtggtgatatccccaccattgatgattggtatttattaaccaataccgttctcgctgagcgattggtgatagaacgaaggcgacagcttgaaaaggttgtcggtcagtataaaactctccttcattttgtcggttggtgctatcttgaacaagtagtatttaagacgtcgaagtataaaggtgagtttaatactttcccatttcttgtggagcggtttttcgctgcatttgatttggaagcacctcagtatgaggtattgccgatgcagtctgattgtttgtcggatttcttcgatgtcggttgtgttgatttacctcttcctatcgaagaggataccatcagtctgccttccgattttcatcgaagtatttcttcgttgtcttacccgtcatgcggttcgtcaagcatggaaagtgggcgtaccagttcgggaggtcccgagagtacgtccagtgatgtttgtcacgaaatttataatgccggacctgttgatccgatgcctcagtgttcccgtcgctggtcagattataccagcgaggaagatgagtgtgaacttgttccacttagcggtgacaccctaccgcgaggtgagatcccaaatgagatcgttagcgttagtgctacggtcaatcgatgcttggagagttcttatatgtctaccgatattcccgatcttggacgatttatcgaagaaccggtcgaatttgatggattcgaccgtgtggttgctgtcaatgactggtggtctgggatgaagttagtcccaaatcttggtattccggatgattccgatgtgatttttagtggtattttatcttcggcccccgaggtaatgcagtcggccattgacgagtttttaccacttcaccaccagatcgatgacagatttttccaggagattgttgaaaccagtgacatttctcttgaattggaaaactgctcctttgatttgtctagtttcaaatcttggagcagtcatgaaagtgggtgttgttcttctttaaacagtggtatgacttctacaagaacgaatacgtttcgggaagctgccctggctataaagaaaagaaatatgaatgttcccgcaatttcttcaagttgcgacattggtaaagtttccgatgatgttgttgagaagtttttctctcgcatcattgatgttgacaaacttattggtttacctattatcggtcatggtgagttggcttggtttgctgactatcttaagggaaaacccgttaatgaggatatgtttgttgatccgatatgtttagtgtctatggataaatacagacacatggtgaagtctcaattgaaaccagttgaagataattctctggcttttgagaggcctttacctgccaccataacatatcatgataagggtaaagtgatgtccacttcacctttatttttggctcttatgaatagacttcttatgagtttaaagagcaagatttctattcccaccggaaagtttcatcagttattttcgttggatgctcaggtgtttgattccgtgttggaatggaaggaaattgacttttcaaagtttgataagtctcaacaggaattgcaccatgaagttcagaagaagattttccttcgtttgggtttaccaagggatttttgtgatacttggtttacctctcatgtccgttcacatatctctgatccttctggactgagattctccgttaattttcaacggagaacgggtgatgccgtgacatatttgggaaatacagtcgtgactcttgctgttttgagttacgtctatgatttgtctgacccaaatgtgttgatggttgtggcatcgggagatgattcgttgattgggtcatatcgtcctcttgatagatcaagggagcacttgtgctccacattgtttaattttgaggcaaaatttccgcacaatcaaccgtttatttgcagtaagtttttattgactatgcccacgaaaagtggaggtcgtcgtgtggtggcggttccgaatcctttgaaattgcttataaaactgggcattcgcaatttgcaagaggatcagttcgatgcctggtatacgagttggatcgatttgattcattattttaatgatgagcatctcatatccgtcgtagccgagatgtgctcctatcgttatcttaggaagcctagcatgtttttgaaacctgctatgtgttccttcaacaatgtctttgccaataagacaaagttgatgaagtttttgtttccctctatggtattgaggaaggacaaacgtaagagaccgcctcgtaagcggtaa

SEQ ID NO: 603 - DNA, 3126 bp, Humulus japonicus latent virus
  source 1..3126: mol_type = other DNA
atggattttcttgcaatacagcaactattgcaaaagtcgatcgaggctcaggccaacgacgctacttccgagatcggaaaagctatatctgaacgtgctctcaaattagttgagaatgccacagagaaacgtccctgtgctgaaccgttgaacgtatcgttcgcttgtaccgcagaacaacaagctgttttgcgaagtcacttcccgggacgggaagttagattttctaataaatcctcgtcatcgcactcgtttgctgctgcccacagattgctggaaacagattttatctatggatgttttaatgacaggaattccccgattctagacttgggaggaaattatgtatcgcactttaaacgaggtcggtttaacgtgcattcctgctgcccattgcttgatggcagagatggtgcccgtcatacggagcgcatgctgcaatatgatgcatataagagagctaatcctagaatattagaggaggctgatttttgcaattgcagatttgaagattgttcgcatatggcaaactatgcgatggccatacatgctacctccgatatgccgctagatgtgttgtgtcgtacattagcgaagaagggcgtgaagaaattcatttgctctattatggccacaccagaaatggtatgctttgagaaaggtgaaattgaacacttcaatgtggcttgggaggttgataaaaatgccgatagaattttttttgattttatccgatgctccgtgcttgggtttatgaccacaagtactcctactcttttgcaatacttgaccgttaatgcggtcaaaggaaaaaattgggcttatagagtagagaggaagaatgacatgaacggggtcattatcgttgacatcacttttattagcggtttcaatgataagactgacgtttctgctggtagatcttgcgcatggatgaacaagctgaaatccatgactttagttagaatcgcgggtttaccaaagtcgctatacggcggagagtatcagttgataactcgtcgtggtgtgctcatcaacaccaaagtgttaactagggtaatcgaggcagcctttcggaatttcaagcctgatacccccatgcagaatgccgtccagagtattgcgacgatgctttcatcttccacaaatcacgtggtcgttaacggggtttccattgttgcaggaacgccgttgcaaatgcgagactatatccctcttgccgtagccatttacgtttatattaagcgtggttacgatgctatacccacactttttgagagaactggtcatgccatgaccaagaatatctttgccagtcaatctgtgctagctaaagtggtggatgcttttatttccgagaaatcaaatctgagaatggctgtgtcagatgcggaatatctttactcaggtgaattctcgaataagaaggaaaaggatgctttgtatgagaagactgagatgtgggttaagaactccttcttctcattattaaagacaaccttttgtcaagaattagatcatgaattgggaatcctttcttcccctgatctattcattcccttagatagagtcttagaggatgaatttgagataccaacagttctgacggttgaagaagaatttgccggcttgcagaaaaaaagagaagccgacgagaaagccatgcgagttcagctggataaagatcgagctgagaaattgaaactcgacaaggctattctatcgattgcagcttatatcgataaggctggggataaagctcccattggtattgctaagttgataccagacattgccaaactctcgaaacctgagcaagtttttgaagagcctgatgccattataaatccgtatgccgatagtatatcagaggctatcgagtacattgagtcaacggaggttataatcgaagataaactaaaattggctgggaattcctgcgattggtccaggagaggcatgaactgctgtttcgtgggagatgattccagaagagtttttctgagaaattccaatgcttgggttggtcctccacacatcccaaatgctgcgccgactgagaagtatgaagtagccatgactaaagatggttgggtcttcttggagtgggaagcagaaggttttgtattaacagaaaaatgcaaacgaaccttaccagatttcattttagtgaataaggattgcgtattccagagcggtagaagaataataccagctttgaagcaagctctaaagaaagatgcccggtttaaggtaaaaattctcgatggagttgccggatgtggtaaatcgtaccagatagctaactctgtagatctatctgatgtaaatcgtgatctggtattaactagtaataggaatgccagtatcgagttgcgagaagtgatcaaagcctcacctctgatgaaagcaaaatatgtgaggacttgcgattcttacctcatggcctctagaccagaaaaggctagaagattattgttcgacgaatgtttcatgagacatgcgggtttcgtttacgctgcggccactctggctgagtgtgaagaagttctggcatacggagacaccgaacagattcctgaaattagccgaaatccggcttttaaattcagatgtcacaaattagaaggtgaaattgtccagcagactgtcacttatagatgtcctgctgatgctgtctatgtcttgaataagcatttttataagacaaagagaaatataaaaactaagcgccataaccccatgagatcactgaatattcatgccataaattcagtgcgcgcagtaccagttgacaaatcagctttgtatttgacttatactcaggctgagaaggaacaactgaagtcagcttttcctggtgtgaaagtgttaactgttcacgaagctgaaggtgcttccgtaccaaaggtgatacttgtgaggttgtctagaacttcactaagtttgtacactggtaaagatgcagtttttggagcaagccacgctttagtggctatctcgagacatactcattgttttgagtattataactatgccgctacagatcaagatgatattatttggaaggcttgtagggatgccttgacatgtagtgatgaaactcttttgagtttttgctgctga

SEQ ID NO: 604 - DNA, 970 bp, Raphanus latent virus; identical to SEQ ID NO: 544
  source 1..970: mol_type = other DNA

SEQ ID NO: 605 - DNA, 2340 bp, Raphanus latent virus; identical to SEQ ID NO: 545
  source 1..2340: mol_type = other DNA

SEQ ID NO: 606 - DNA, 7128 bp, Arracacha latent virus C
  source 1..7128: mol_type = other DNA
tgcaaaataggtgattcttcaaagagcactggtactcttgaagaagaaataacaggaactaccagattcggtgatggttatcgagtccttcgatatactaaaccattttatatagatgtctttatgtgctttaatcgttccttttctcgcaattatgattttaaatttcgttgtttgttcaaaaaatttggaaaatcaaaaatatatacagcaagagtgatgtcagcaataggccactcatctggagtgcatcaaatgtggtgtgatgacttcacttgcttcactcgtctgtcaactaaacagtttgcagctgaatgcctcctactgtcagtcgtggagaggatagacgagtttaagaatgtcatgaactacaaacccaacccagtattccgtgaaccggttgggagggccaagaaacagattgcccctttgtgtattcaattccatgacaaggtggaaggaaaggttttggtggggacgcccaaacctgttttaagtgccccaaaaacccgcgtagaccccaacaaagtcactgcggtagatcacaaagtctctggagatggctcagagttctttgttgttaaatacgccaatggttctttcaaaaccgtgcgtaatgatgaccgtgccatcgccaatatgtttaatgccactttagagagaaacacatactacattccgtatgagtgtgtaactccaaatggtggcaggtttttcaactaccaggataaatactgctggttggatgccttcatgcttgctggtaagaagataccagacactcttgttccatacccttatttaacaatcgcttatatgaagcgatgtggtctcgaacgtgtgatgaagggtaggatcactatccacagtgatatgacaggacatttctctgtcaatagaatcaagacactgatcaattggaatgacaaatgtagaatcggtgttaagctcgctgatgagcatgatatgtcgatcaaggacatagacgtgttctttgatgagatttgtgatggaattgttaagcaaaccagtatgagatctgagaacgatcttatgtccaatgttgtcaggagagtgtctgacaagttgaattcctctctatctcaagctagagagttgcaaatatctgtttgcaccactagtaaccagaagaaaaagatcacagatatgtttccagatcttactattggtttctctgataaatcgtattcgtctcacgcactatttacaggcttaagagaatgcgagaattattatatggcaaagaagcagggatttgcaaatttcatagatgccggtggtgatgtcgtcaactatgtgtttaaagattgcaagaacatccatgtatgttgccctgtagttgatgccaaagatgctcagagacatatgactaggagcaatcttcttgataagattgctggcatcactgagacggttgatatctgcgacaacctctgtcaaaattgttacgtcgagaggcccaatatagttgcggttcaggtttatgacatgactttgattgatattgctagaagtctgatagcgcataaagctaagagatttgacttctcgttattcataccaccagagattgttgacagcaactgcgatgtcactatgtttgatggtgccctcaaggtccttgttgataatgataaggtcaaatattcctatggtgattatggtgaaacttattgtcacgacgtcaaaaaccttagggatatactgaagactcaattgttctcagttgatggtatcgtttttaagaagactcttgaatgctcacgagaaggattacacttttatagtgttgtaccttgcgttgggttcaaaaatggcaaatacgagatgacaacccactaccgaaagactgaaattgataaggtgttaatgatattaccaagtcgcaataggttcggtgtcattgagaacactcgtgttaaagttgataaaagtatagtttatcatcttttagaatatgtcatgaacacagcacttagagtggatgaaaaagctcaggaatacctgagttctcaatttagaacacgaaaatcaatgaccatcaagggtggtaaagtcattcaagtcccatttgaattgacctttgatcattatccagggttccttggtgtcattttgggtgaaggtgtcagacttcgcgagaagactacttcaatggctaaactcagctattataaacatctcatgccttcaatcttgtctataatagttgcagcactccacagattagttgtctccgtaaagcagtttgcttatgagaagacaattgatatattgaaacttgtcttggccgaagatttgataactgatatgttatatggtgataggcgtatttttgacattcatgagacttatgaatttacacaagtcgtaaatgtcataggtgatgagagtaatcagagggttttgaatgaatcctttaatactttcatcagtgaatctgaagaaaggttgaacaatttagatgtgcaattagaacctctagattcaagattcaccactgatgaacaagagttgatgagagacattgttcttggtggtggaggatccagacctatatgcgacagaacattggaaaagatttttatcaagctttttaatttgtttgattctgttttgtccaatgttgagaaagcaggaaagtttgctgcttttatttctcaggtagcttaccaattcttattgagaggtaagaaggcttgggatgtggtcaaagatctcatcaagacttttatcagagctgtgatgaccggtggaaagaatctccaatcaagcaccatgaaccttcttaagaaagcggcagcaaaaacaaaaaataaatttctgggtgttaattcacaattgctagccgatcttgagagaatgttagatgaagacgaagtagatcaattaccatcatcaactttatgcaatcatgaagaaacaagtgataaagatgttggtgagattattgtcgaagcagcacgacaatatcctgatttcaaacaaattgagggggttgaagtagtgcaagaaagtgaaccaatcaccgcaggattcactgatgaatttcaagctcagtaccctcagttctcaagattcatttgtcatgggggttttcttagaagatgtgcaaaaaatctctttgaaagaattaccaatatccttaagagatttttcatcattgttaaagatcctaagagggccttccatttgatagttaatggtattgaagatgtgttaaattttccatctgtcattaaatcatattggaagactggattgcggtatatgtatgatagcatagataccatagatgggatgaccgtaatcattcaaggtgtagctttcctcggatctaatttgattttgaccttattgacaggaaatttacacatcatacctaatgtggtggctttattggttttccttggtcttaagaagttcgggattgagaagaaatatttagtggatagtagtgtttcttctcaagtagctagtagtgtgttgggtcttaatcatttcggaatgctcacaattcctattagatttggaatcagccagtatatgatgttgaaattcaagaaaaagcttcttgaagaaaaggttatgccgaacaccatcaatcaaatagtggccaaggacattattcattacaagattgtagacagattcactccaagaatcttaagaacttgtttagggttatctgctcttgtatttctttacatgcctcggttatctataaccatgatgattctcttcgtgctcatcgctgatttcaagaaatatttagagaccttcgctgttcaggccaatatgacattgagcttttcctccgtgttgtcaaagactagtaaatctttgagactcaggaatttcaagcgtatacttaaagaaaaatttatacgtcaacaagctgagggagatgaagaggagatggatggtaatgtggttatatcaggtcagggtgcgaagatttcagaatatgtatctgatgatgagattgaactcgactatgctggtaaagagataatcaaagataatgccactttacaaaacgagaaatttgtaaaatttcaagacgacaagaaagcggctttatggggtgataggagttcatgttcagagtctgatactgtttttagacatcttgaattctcttctttgaacccaacatcagacagacgatatgttgagtgtgaggtatcttttggtttaagtaatgttatattgacatatccatcatcaagtttgaatgtttttattgagactttggatcagcaaacaaatgcattgggtgaattctactacctagagagccagagactgtgcatcgaaataggtaagttggataatgttatagccaaatacaatgcaaaacattccgacagaaaaactttcaaggatgtggtctgggatatgaggaatgtaattgatgatgccactctttatatttcagaagatggtaaacactggcatagattgaagaggggtgattcaggaaacgtgcaattagaaggtagcgcgaaaattgatcttaaccatcacatgactgatcttcttcacactaaatctggtgttcagatcacaagtgatgagatgcttggtatgtacaccaacaatagattattggctttggagaaattcatggatggtgatatgaatttcactaccaagaaactttcgggaatgattaccttctttaacatgcccccgggagctggcaagactacaacaatagtcaaaaagatgaagaatgactataccagcaggactcgttgtttggcattaacttgtacaaacgctggtaaaaaggagattatagctaagctcaaagcagaggggatagcatcagctcacacactggtgtcaacatatgattccttcttgatgaaaggtagagatatcatcgttgacagcttatattgtgatgagatatttatgattcattgtggtcaatgggtcgccgtgatgaacatgatttctgctgcaaatgttgagtgttacggtgataaaaatcaaatacctttcataaatagagtgccaaataccaccgctttacactcaaaaaattttttcatgttgtttccgatgattcatgacaataaatcttacaggtgtcctcctgatgtctgttatttattgtctaacttaacagacgcaactggtaataagttatatcccaacggtgtctattcagcaggaaagaattcagacaatattaagtcaatgagtgttgaacctatgaatgggattaatgagataaaatttgatgccaatgagaaatatatcactttcactcaacatgagaaggaggaagtgacaaggcttggtggaaaaataaagaacacttcaataaatgctaatactgtcaatgaagtgcaagggggcacatttaagtcggtaacgctggtcagggctcgtcagtatgataatcccgtttattccaatgtgaatcaatttgtggttagcatatcaagacacactgacagaatgtgttatcaagtttttccctccaagttaaatgattttgttggtgagaagatctctgctttggatagagtgtctgactacgtagtcaaggagtacaaatttaagcggcgagttgacgcttatgttttggaagttgacagcttacaaataccaccaaccttgagtcgacctccatcttctcatcataaagcagttaatgagtttatgagtcttataaatataaatttggctgcttatgactacattcatcgaactttaatttatgagttcgaacaatatgaattacctccagttgatgaagtgaaattagatgtatctaaatctagagtgtatcaaccaggtgagtatctcataccagatatattgggtaaaggtgaaagggcgagacctaacacttggaaacaagttatgatgtctttgtcacatagaaacttcagtgcgccaaggattaatgagtatattgatgtcgtggctactgctgaacgtttagccacctcctttatgtctgttatgtctaaagagaaattgtatgaatcttacgagatgatagtaccagatctctatagtatagacaaatggttggagaatcgtgaaggagacaagttgcgtaaattgaagagaagtttttctcatgatttgttggtctctcaattcagcaggatgaagatgatggtcaaaggggaaatgaaaccaaaaatggatgtgtcatcatacactacttatggccctacttccaatatcatctattatgaacatgttgtgaacatgttttattctccaatgtttcttgaggtttttgacagaattgcttactgcttagatgagcgagtagtactttattctggtatgaatctagacacattgagtaaactcataggtagtaaattgagatatccattggtcgaatataacactattgagatagatttcagtaaattcgataaatctcaaggcattactatgaagatgtacgaagagattgtgtacaaattcttcaaattttcagatgttgtttatgataatataaagttcacagaatatttttgcaacatcaaaagcagttgcggtgtatctcttgaactcggtgctcagagacgaactggttctcctaacacttggctgtcaaacactatagtcactttggggataattctaagtgtctactccattgatgatgttgatttgttgttggtgagtggtgatgacagtttgattttcactagaaagagattgccaaatagagctgcagaaatagatagagattttggtatggaagcaaaatttttagaaaattctgtgccttatttctgttctaaattcatagtggaggacagaggaaaaattgaagtcgtaccagatcctgttagattctttgagaagttatcagttcctatcagaatggaagattttctgtacggtgagctgatgaaagaaaagttcacatcccataaggatttgatgcaagggtttgataatgattcagtatgtgtattggtcgacgctatgattgctaaacgatatgacatacctgagatggcatcttatgcagcattatgttacatacattgcttgtgttctaatgcttttgcatttcgtaaaatctatttagattccttttcagtattgatttaa

SEQ ID NO: 607 - DNA, 640 bp, Poa semilatent virus
  source 1..640: mol_type = other DNA
aaagaccctctgggagaagtctcagtttcagacatacgttaaagaccgtaactacggccttgaagcgtatctgctttttcagcagaagtctggaaattgtgacacttacggctcgaacacttggtcggcagcactggctttgctagattgtctccctcttgaggacgcacatttttgcatcttcgggggggacgattctttgattctatttgaaagtggttaccctgtacccgatccttgtacaaagttggctggcacctggaacttcgaatgtaaggtctttgatttcaaatatcctcttttttgtggaaagtttatgttgaacatcggtggtaaatacatgtttgtacctgatgccgctaagttcatcgttaagctaggtcgagcagatataagagatgcagaagtattaagtgaaattttcatctccattaatgataactactgctcttataaagattataaggtgcttgaagagttagataaagccttagttgatcgttacagggcgccttacagcgctctgtcggctttgacttcgttgtgttactatatcttcgattttcagaagttcaagttgttgttttcgtgtgatggaaattttgtagataaaaagttaagtagggacttcgactggtaa

SEQ ID NO: 608 - DNA, 4839 bp, Brugmansia latent virus
  source 1..4839: mol_type = other DNA
atggcacacacacaaacaacaatgaccaacgctcttcttgagaacgctcgcgggactaacagtctcgtgaacgatctcgcaagaagacgcatgtacgatatcgcggttgatgaattcaatgctagggaccgcagaccaaagattaatttttccagagcaattagtgaagaacagacactaattgccacagaagcttaccccgagtttcagattaccttttacaatacacagaactctgtgcactccctcgcgggaggtttaaggaatttggaactggaatacatgatgatgcagattccttacggttcgttcacttacgatatcggaggtaattttgcttcacacctgttcaaaggaagggcatatgttcactgctgtatgcccaatttggatctgagagatataatgcgccataatgggcaaaatgactctgttgaaatgtacgtcaataggatgcaagaaaaggggaaagccttgccggctttccaaaaggttgcctttgataggtacgccaacaaccccgaagatgtactctgcagggacaaattccaggagtgtaagcatagcaaggactcaatgcacggaggaaagacgtacgctgtggctctgcacagtctgtacgatattccagctgatgagctcggtcctgcgcttttgaagaaggacgttaacgtctgttttgctgctttccacttttctgaagagctcttgcttgaaaattccagtgtcactctggacgacattggtggtctgttcactagggagggagacgtcttacacttctccttcgcgaatgagccgactttaaactacactcatagttatagtaatattttaaagtatgtgtgcaaaacttttttcccagcttctagtagtatagtgtatatgaaggagtttttggtgaccagggttaacacctggttttgtaaattttctaaggttgatactctgtacctgcacaagagcattaaatcagtcggttgcgacagcgaccaatttgctagtgcaatggaggatgcttggcagtacaagaagacgctggcaatgatgaacactgaaagaattatgctgaacgattctgcctccgtcaatttctggtttccaaagatgagagacttggtgatagtccctcttttcgacatctctatcgatactggtaagagaagtaggaaggaggtgtatgttaataaggattttgtctacacagtgcttaaccatatccgcacttaccaggccaaggcgttaacttacgccaacgtattatcctttgtggagtcaatccgctctagggtaatcgtcaatggggtcactgctcgttctgagtgggatgtggataaggcacttttgcaagatctggccatgactttctttttgcagactaagttgagttcccttaaaacagatctcctcacggagaaattcaaagtagggaagaaatcactgtctgagcatgtgtgggatgaaattagtacttcagttggaaatctttttccaactctgaaggagagactgttgaggcggaaggtgatcacttcttctgcccaggctttggagatcaaggtaccggacctgtatataacattcaaagataggttcgtgtccgagtaccacaggagtgttgagatgccaaatgttgatatctgtggtgcactagaggaaacccagtcgctttactcggctctgtctgaactttcagttctcaaggacagtaccagtttcgacgttgataaattctcgaggatgtgcaaggtactggaagtagatccgcatctggcggccaaggttgtggtggctgtactgtccaatgatagtggggtaaccctcacttttgaaaagccaaccgaggagaatgtagctaaagttctagctgcaagtccacatgagcctcgagaagaggagattgttttcaagactgacacaacaagctacattgataacagaatcattgctgaagagcgtgtcatcccagtgtccggcctgactggaggaacttcacaagagattgtggaagtgaaggaggatgttgttagcttaagtgactatcataatgcttcagtggagagtatcgtaaaaaagcaaatggtatcgatggtctatacaggcagtctaaaagttcaacagatgaagaactacatggacagcttaagtgcctctttatcggctgcagtatcgaacctccggaaagtattgcgtgattcgatctatggcgacgcaactgatgggaagtacggcgtgtacgacgtacttaagaaagtttggctgatgaagcctatcaggaaaggtcatgcatggggagtggtcgaagagaacaatggaaagatgaaagtggtcttgcttgagtacgcagacgggaacattgtctgtgggagcaattggaggaaaatagctgtctcaactgagtcagtcgtgtactccgatatggctaagctgcaaactttgaggggggttctgaaggacggtgaggtccaggtcagctctgcgaaggttgtgctagtggatggagttcccggttgcgggaaaacaaaagaaattttgcagagggtcaactttgatgaggatctagtgctggtgccaggaaaagaagctgcagagatgataaggagaagagcaaatgcatctggcattgtagtagccaccaaagacaatgttaaaacggtggactcctttttgatgaactatggaaagagaatcgggaggcaaacaaagaatctgtacatagacgaaggtctgatgctgcacactggttgtgtgaatttcctcgttctcctttcactttgcgaaaaagcatatgtgtttggggacactcagcagatcccgtttatcaatagagtacagaattttccataccccgaacatttttcaaagcttgaggttgatgaggtggaaacaagacggtgtactttaaggtgtccagcagatgtgacctttttcctcaatcagaggtattcaggtcaagttactacacagtcaccggtctctaggtcagtttctacagagttgttgcaggggtcagcgtcgctgaaccctattaccaaaccgctggagggcaaggtaattgtgttcactcagaatgacaagcatttcctcgaggagcgaggttacaggaatgtgaacactgtccatgaggttcagggagagacttttgaaaatgtctctattgttagagtcactccaacaccacttagtattgttgctagggatagtccgcatgtgttagtcgccttgtccaggcacactctttcttgtaagtactatactgtagtgttagatgctttgtccagtgtagtcaatgatttgtccaagattagtaattatctcttagatatgtataaagttgagtcaggtgtgcaatagcaattaaaggtggattcggtgtatttgaattccagtttgtttgtgcaagccccaaaaacaggagatgttcaagacctgcagttctactatgacaaatgcctccctggtaatagcgttgtactcaatgagtatgatgctgtgactatgaggctgtctgacaacaggttgaacgtcaaggactgtgtgctggatatgtcgaagtctgttgctcttccgcgtgacgaagtgccggtgttaaaaccggtgatcagaaccgctgctgaaaagccaagagttaacggtcttcttgaaaatttggtggcgatgattaagaggaatttcaatgcaccggatctctctggtattgtagatatagagaatactgcttctgtcgttgttgataagttttttgatagcttcttcataaaagaaaaaaggaaaaagaaacacttggtggaaatgagcagggatagcttgaacaattggctggcaaaacaagagagtgcaactattgggcagttggctgatttcgactttgtcgatttaccgccgatagaccagtacaggcacatgatcaaagctcagcctaagcaaaagctagacctgtcgattcagtctgaatacccggcattgcaaacaattgtgtaccacacaaagaaaattaatgccatctttggtccgctgttctctgagctaacaaggaacttacttgagaacatcgactcttcaagattcctattctttacaaggaggactcccgaacaaatcgaggagttcttctctgatttggactctcatgtcccgatggaaatcttggagttggatgtttctaagtatgacaagtcacaaaatgattttcactgtgctgtcgagtacgagatctggagaagaatgggaattgatgagtacttggcagaagtttggaagaagggccacatgagaacaacactgaaggactacacagcagggatcaaaacttgcttgtggtaccaacggaagagtggcgatgtgacaacattcattgggaacaccgtgataatagcagcttgtttggcttcaatgctaccgatggaaaaggtcattaaaggtgcattctgtggtgacgatagtttactctacttaccgaaaggttgtgagtatcctgacatccagaggtgcgctaatatgatgtggaaattcgaggcaaagctgttcaggaaaacctacgggtacttttgcggtaggtacattattcaccatgacagaggtgctgtagtgtactatgatccgttgaagttgatttcaaaactcggtgcgaaacatatcaagagctatgctcatctggaggaattccgagtgtctctgtcggacgtggcaacgtctttaaataattgcgcgtattatacacagttggatgttgctgttagagagggccataaaaccgctcccagcggagcgtttgtttataagtgtttagttaaatttttgtctgataaaaatttgtttaggagtttgttcacattttaa

SEQ ID NO: 609 - DNA, 4941 bp, Hibiscus latent Fort Pierce virus
  source 1..4941: mol_type = other DNA
atgacaacttcaactacagacattaaacaacaaattacaaatgtacgagatgatgccgcacatggtgctgcatctctcatcaaaggtttggctactcgtcgtgtatacgatgaggcagtcaataccttaactttattggacaagagaccaaaattttctttttccaatctggtaagtactgaaaatgcaaagatggttactgaagcttatcccgagtttaatatcagtttcgtgggtaaccgcaatacagtccattctctcgccggtgggttaaggaaacttgaaatggaatacttaatgaccttagtcccatacggttctgccacctttgatattggcggaaactacgctcaacatctgttgaaaggaagagcgtatgtccactgctgtaatccgtgccttgactttcgtgacatagcaagaaatgaatcttacaaggacacagtggactcttatcttaaaagattcacaacacccgactgtgggtggttttctggagcggtccgtgctatcaccgcaagacctttaccgtccttccagaaggaagcttttgagcgatataggcaggtaccttccgatgtgacttgttcacaacctttccaggattgtgcaatgagaacacctcctaatcaagactgtttcgccatatctgttcactcgctttatgacattcctgtcgatgaattagggtgtgccctactaaggaaaaatgtgaaaattctttatgctgcactccatttctcggaggatttgttattaggggctactgacgctcctttaggtaatataggtgctagattctatagaaatggtgatgaagtcacttttggttttgacggtgagtctacattactgtacactcacagtttcaagaacatctgtggttatattaccaggagttttttttacgctggtgctaaatatgcttatatgaaagaatttatggttaaaagagtagatactgttttttgcaagtttgttcgtatcgatacccagtgtttgtacaagtccgtatttcatactcagatagactcagatgctgttctagagggtatggactcagcttttactgccagaaggcaagctgcaatgcttaatgctgcgaggccactttttaaagataaggccgcttttagtgtttggttccctaatgccataggaaaggttttaatacctatctttcgtgggaccacctgcttaggagcaaaaattaaaatggaaaaaaggctcgtagatgaggactttgtttataccatccttaatcatatcaggacatacacagggaagcagttatcatatgaaaacgtgctttcttttgtggagtcaatcagatctcgggtggttataaacggcgctaatgtcagatctgaatggaatattcctaagagtgacattcaagacatagccatgtctttattcctgataactaaactcagaactctacaggattccgctgtgttaagtcactttgatataaaaaaaaaagggttttttgactgtgttagagaaactataatggaagtcactggtagcatttttgagcctttgactcaaatttgcattgatcatgggtggttcaagataaaggaggacaagcttaaagttgaagtcccagatacatcaagaactttcatgagttacatgcaaaccgagtttagtgaatcaaaagctatcgagagtctcgacttgtgggagtaccttgatcaaagcaatcaactctacacacatgtatcaaagctgatggaacgatacagccttcctgattttgatgtggagaaatttaaggatctttgcgctcacctcaaagtagggcctgaggttattactgcagtgattgaggccgttatggataaatctttgggcttcactgtagtaggtgggaaagctgagcatcagtttactgatgagatgaaagcggcggtggcagtgagtgctgattatggtcagcattgtaccgacaagaaacaagttgcttctgctgcttgtaagaatgaggtcaccaagccgctgaaaaaacagtgggtcgagaagactactgcggcgttgcctttgcaggcaaccacagaaaaaactcaacatttccattttaacgatgaagatgaaagcatcagtgttgagaatttgcatctgaagagagcagacactttcaaagcttccaaggcctgtatgttatacacgggcactgtgcgagaacagcaaatgaagaactttttagattatctttctgcttctatttgtgctactataagtaatatagaaaaggtccttagcgactattgggtcagtggtacgcaaacgtatcagacttatggtctgtgggactgcaaaaaaaaaaaatgggtacttcaacctccgactgctgggcactcgtgggggattgcttccattaagggtgagcattttatcgtcatgctcagttttaacgagaatgtagagcctatctgtgactcatcatgggatatggtttgtgtcagcaacgatacaaaacttttttcggctatgaaaattctcgaaaatttaacccctctgcctgtaaaagaatccaacgcaaaaatcacactggtggatggggttccagggtgtggaaagactgccgagatacttgccaaggccaatttcaaaaaggatttaattttgacacaaggcaagcaagcagcacaaatgatcagaaaaagggccaatgctatcgactgtacaaagccggctaacaccagcaacgtgcggacagtggattcttttttgatgaatccaaagccctttacttatgacaccctttggattgatgagggattaatgctccacactggtatggtgaactattgcgttttgcttagtcactgtactaagtgttttatatacggcgacactcagcaaattccttttatcaacagagttatgaattttgactacccaggtcatctgaggaccattgtagtcgatgatactgaaaaaagacgcattacttctaggtgtccattggacgttaccttctacctcactcagaggtataagggtccagtgatgtctacgagtagcgtcaccaggtctgtggagacaaaattcgtagcgggaccagcacgttttgaaccgcgtgccaccccactacccgggaaaattgtaacatttacccaggccgataaggagacactcaagaagaagggctataatgacgtgcatacagtgcacgaaatccaaggagaaactttcaatgaggtctcattggtgcggctgactgctactcctttaaatataatatcaccagagtcaccgcacgttcttgtaggtttaagtagacatactaatagattaacctattatacagtagttcacgattgtattacatatagtataagtgagttgagtaggctaagtgattatatttttgacatttatagtgtagaaggccaaaaggcatagcaattacagcaaaaccgtctctacatccacaaaaacattttctgcccgacgcccaagataggctgtatgtctgacatgcaggattactatgacaggtgtcttccaggaaatagttttgtgcttaatgattatgacagagtcactatgcgattggtagacaacgtttttaacgtggaaccatgcactttgactatgtcaaaagctgaccctgtggatgcagaaatgaaattggcatcaaaaaattttttaaaacctttgattagaaccgctgtggaaaaacccagggtgcctgggcttctagagaatcttgtggcaatgattaagaggaactttaattcccctgatcttgccgggattatagatacgcagatggtagctggcagggtggtcgataaattttttgatgactttttcactgatgacggtataaaacatatagattcttgtaaatataataagtatttgtacagtaaagagaatttatctgtttggtatgataaacaacaaccgcaatcagtagggcagttggctaatgctgattttattgattttcctggtgtcgatgaatataaacatatgattaagacacaacccaaaggaaaactcgataatagcattcagaccgagtaccctgccttgcagacaattgtttatcatagtaaacacgtcaattctattttcggtcccatttttagtgagtatactagaattcttttagagtctatagatactaacaaatttttcttttacacaaggaagactgtggacgagcttgaagggttttttagcgatctcactgaccacagtaatatggatgtgttagaactagatattagtaaatatgataagtcacagaatgatttccacttttgcgttgagatgaagatatgggaaagattaggcattgattcctttttgaaacaagtttgggagagtggtcacaaaaggaccacccttaaagactttcaagccggtatcaaaacgatcatttaccatcaacgtaagagtggtgatgtcactacctttatcggtaacaccctcattattgcagcttgcgtaagttcacttctgcctatcaaagattgcattaaagctgcattttgtggtgatgactctgtgatttattttaaaaagggtttagatttctcttgtgtccaatccaatgctaatcttatgtggaactttgaggctaagcttttcaaaaagacctacgggtatttttgtggtaagtatatcatccaccattccggtggctgtataatttaccctgatcctttgaaattgatacaaaagcttggtaataagtctcttacctcgagagaacatgccgaagaatttagggtatcgctttgtgatgtctctagaaacctcggcaactgtgcttatttcgacttgttggataaggccattgctgaggtttttaaacaagctggtggcggttcgtatgcttttaacgctttttggaaatacatcacgaaccctgcgctttttaaaaatctttacgatgactctggaccttgctaa

SEQ ID NO: 610 - DNA, 4944 bp, Hibiscus latent Hawaii virus
  source 1..4944: mol_type = other DNA
atgacagatattaatcaacaaattacaaacgtacgcgatgatgccgccaacggggccgcatcattaatcaaagggcttgcaacccgtcgtgtttacgatgaggctgtgggcactttgaaacttttggacaaaaggccaaaattttcctttaccaatactgtatctacagatcaggccaagcttgttactgaaaactaccctgaatttaacgtcagttttgtgggtagtcgtaacagcgtccattcccttgccggtggtttgagaaaacttgagatggagtatctaatgacacttgttccatacggctcaccaacttttgacataggtggaaattacacacagcatttattgaagggaagatcctatgttcactgttgtaacccttgtctagacttccgcgacattgcacgaaatgaaaattacaaggaaagtctagattcttatcttagaagattcactacacctgattgtggttggctatccgcagcctatcgcaaaatcgctgccagacctttacccagttttcaattagaggcaatggagcgatataggcagaacccaacagatgtgacatgcagcttgccctttcagcaatgtaagatgcaaagccctgacggtcaagactgccatgctatatctgttcattccctgtatgatattcctgttgaagagcttggtgcagcactccttcgtaagaaggttaaaactctttttgctgctcttcatttttctgaagagcttctaatgggtgccaccgaagcttctttggggttcattggagcaaaattttacagatctggtgatgaagtcacctttggattcgaaggggaatccactctattgtacactcatagttttaagaatatatgtgcttatataactagatcgtttttcgtagcggatagtaaatatgcatatatgaaggaattcatggtaaagcgtattgatacagttttttgtaagtttgtgcgtatagatacacagtgtttatataaatcagtatatcattgcacaaatgatgcggaaaatttcatcaaaggtatggatgacgccttcgctgttaggcaaagagcagctatgttaaatgcagcgcggcctttgtttaaagataaagccgcgttcagcgtgtggttcccaaacagcgttggaaaagtaatcattcccgtcttcagaggcagtactgtaagctgctcaaaagttaaattagataagctgctggtagatgaagacttcgtcttcactatcttaaatcatatcaggacttacaccggtaaacaactcacgtacgagaacgtgttatcttttgttgagtcaatccggtcgagagtggtcatcaatggtgctaacgtcagatctgaatgggatgtaaaaaaaaaagacattcaagatattgctatgtctctttttttgatcaccaagttaaggactgttcaggacaatcatattcttaaaaactttgatataaagagcaaaagcttttttgactgtgtgaaagaaacaatcactagcgtagctggtagttgctttactcctctagctcaagtttgcattgacaataattggtttaaactcaaagaggatgctctggtaatagagatcccagaactgagtcagacctttatgtcctttatgcaaaaggagtttagtgagagtagagccatcgaaagcttagacttgtgggactatctcgatcaaagctcacagctttatactcatgtgtcaaagttgatggaaaaatatacattgcctgattttgatgtggaaaaattcaaagatctgtgtgccaccttgaaggtgggtcctgatgttatagcaactgtgattgaagctctgatggataaatctttgggcttcacagttgttggtggcagagatgataagactagaagcgcagagttaacagctgctgttgctgtcagtaaagattacgggaaaggttatcatgaagaagcctttgagcagaagcctttggcttccgctgccgcactgaataatacgccaatgtgttcccttaaaaaggagtgggtgaagaaaagagtggcagatatgccgttgcaagcgaccactcaaaaggtgcagagatttttccttactgatgaggaagaaggtgtagacatggacgatctgcatttaatgagaacttctaaattaaaagaaaaaaaaacacaaaaaacttgtatgctttacactggtactgttagagagcaacaaatgaaaaactttttagattatttgtcagcgtctatttgcgctacaataagtaatctagagaaagttttaaacgactactgggtcaccggtagtcaaacttaccaaactttcggtttgtggagctgcaaaaaaaaaaaatggatacttacaccgccctctgctgggcattcatggggtgtggcgtctatcaatagtgagcattttatagttatgctcaattttgatgagaatggccaaccgatctgcgatcctcaatgggacctaatatgtgtgtcgaatgacacaaaacttttttcgtgtatgaggatcttagagaatttattaccattgcctataaaggaatcagtagcgaccgtcacccttgttgatggtgtgccagggtgcgggaaaaccgcagaaatcttaaagaaggcaaattttaaaagggatttaatcttgactcaaggtaagcaggcagcacaaatgataagacgccgtgctaatagcgcggatgttacaaaacctgctaacacagataatgtgaggactgtggattctttcttaatgaatcctaagccctttacttatgacaccttgtggatagatgagggcttaatgcttcacacgggtatggttaattactgtatcctcttaagtcattgcactaagtgcatgatttatggtgacacgcaacaaattccttttattaacagggtaatgaatttcgactacccacaagtcctacggacggtggtagttgactctgtggagaaaagaagggttacttcacgttgtccgctggacataacgtattatctgtctaaccggtatggcggaccagtgatgtcaaaaagcgatattacacggtctgcagatattaagtttgtggcaggtgctgcgagatttgagcctcagctcacacccttgtctgggaaaataataacctttactcaagctgataaagaaactttaaaaaaaaaaggttattgtgatgtgcaaactgtgcacgaggtgcaaggtgagacatataacgaagtttccttggttcgtgtcacaccaactcctttaagtatagtttcaccagattcttcacatgtactagtaggactatctagacatactaatagattaacttattacactgttattcatgattgtataactcatactattactgagttaggtaaagtaagtgaatatatatttgacatgtatagtgtagaaggtcagcattcatagcaattaacgcaaaacagggtttatatacatagaaacattttttgtccaactccaaagttaggaacgatatcggatatgcaaaactattacgacaggtgtttgcctgggaatagctttgttttaaacgattatgatagaataaccatgaggttggttgataactgttttaatgtagagccctgtgtattgactttaagtagatttgaccccgtagattcggagatgaaattgtcatcaaagtcttttttaaaaccaatgttgcggacagctgctgagaaacccagaacccctgggcttttagaaaatcttgtcgctttaataaagagaaatttcaattctcctgatttaagtggcattattgacatcgacagcgtcgccacagtggttgtggaaaagttcttcgatgattatttcaccactgaaggtattgtgcatataaatagtagtaagtataataaatttttatatagtaaagagaatttttctgtttggtttgataagcaacagactcagtctgttgggcaattagccaatgccgactttattgacatgccaagtgtcgatgaatacaggcatatgataaaaacccaacctaagtctaaattggattgtagcatacaaacggaatatcctgcgctacaaacaattgtttatcatagcaaacatgtaaatgctgttttcggtcctatttttagtgaatatactagaataattttggagtctatagatactacaaaattttttttttatacaagaaaaactgtggaagatttggagttgttcttcagtgacttaacggatttgagtgaaatggatgttttggaactggatataagcaagtatgacaaatctcaaaatgatttccactttgctgtggaaatgaaaatttgggagcgtctagggcttgattcatttctaaaacagatgtgggaaagtggtcacaagaagacgactttaaaggattttcaagctggcattaaaacgataatttaccatcaaaggaaaagcggagacgttactacctttattggtaatacattaataatcgcagcttgtgtgagcagtttgcttccgataaaaaatgctattaaagcggcgttttgtggggatgattcggtaatctactttaaaaaaggggaagattacgcaaatctccaaacaaacgctaatttaatgtggaattttgaagctaaattgttcaagaagaaatatggttacttttgtggtaaatatataattcaccacgggggtggctgtataatttatccagacccgttgaaacttatgcagaaactcggtaataagtctctgacctctcgacaacacgccgaagagttcagagtctcattatgcgatgtatcaaaaaatttgggtaattgtgcgtactttgatttgttggataaggccattgctgaggtttttaaagaagcaggtggcggttcgtatgctttcagatcttattggaaatttataacgaaccccaggctctttgaaagtctctatgtcgagtcttaa

SEQ ID NO: 611 - DNA, 4920 bp, Hibiscus latent Singapore virus
  source 1..4920: mol_type = other DNA
atgactacagacattaaacaacaaatcacaaacgtacgcgacgacgcatgccaaggggcatcgtcgttaattaaaggtttggccacccgtcgtgtgtacgatgaggcggtacaaaccttaacagtgttggacaaaaggccgaaattcaccttttctaatatggttacagccgatcaggcgaaacttgtcactgaggcttaccccgagtttaatataagctatgtgggcaataggaacgccgtccattcactggccggaggattgaggaagttggaaatggaatatttgatgacactcgttccttacggttctcctacctatgacataggaggaaattatgcgcagcaccttttgaaaggacgatcatatgttcactgctgcaatccttgtttggatttcagagatatagccagaaacgagaattacaaggagactttggattcatatctgaagcggttcactacgccagattgcggttggttctccgcggcgtgcagaaaggttactgcaagacctttgccttattttcaacaggatgcattcgaacggtatagacaaaatccgaaagacgtcacctgttcagaaccctttcaggattgttgtatgcaaccccctagtaatcaggattgttttgcaatttctgtgcattcactctatgacattcctgtcgatgaattgggcgcggcactcttaaggaagaacgtaaaaactctttacgccgcactccatttctccgaggagcttttaatgggcgcaactgaagcgcgactgggcacgattggtgcaaaatttttccgggagggtgacgaggtcacattcggtttcgatggtgaatccacccttctttacacgcactcctttaaaaatatttgtgcttatattactaggagttttttttatgcaggagctagatttgcttacatgaaagaatttttagtacgccgtgtagatactgtctattgtaaatttattaagatagacacgcagtgtttatataagtccgtattccatactgatatcgataacgaaaatatgataaaaggtatggatgaggccttcatgtacaaacgagaagccgcgttgttgaacgcagcaagacctatttttaaggataaggccgcttttcgtgtgtggtttcccaattctgtaggaaaagtgattatccctttttttaaaggtagttcatgtacatccgccaaggtaaaggtgaaaaaaagactggttgatgaagactttgtcttcactgtgctaaatcacatccgcacctattccggcaagcaactgtcatatgaaaatgttttatcgtttgtcgagtccatccgatcgagggtggtagctaacggtgctaacgtgcggtcagagtgggatatcccaaagtctgagatccaagatatcgccatgtcattgtttttgatcacacggttaagaactctgcaggacagtaatgttcttcagcagttttcggtcaagggcaagagtctgacagatctcgtgaaggaggccctagggggtcttgtcggttcgatgtttgaaccactgactcaagtttgtatagaccggggttggtttaagttagcagagcacactttaaaagtggaggtgccagagctttctcaaaccttcgagagttatatgcaaacggagtttagtgagtcgaaagcaatcgaagcactggacgtctggagctatctggatgagagcaatcagctttacacccatgtctcaaaattgatggagaagtatacaatgcctgattttgatgtggaaaaattcagggagctctgcgcgctactaaaggtgggaccgaacgttatatcaacggtcattgaagcagttcttgataattcactaggcttcacaattgttggtgggaaacccgagcatcaatattctgatgagatgaaggccgctgtcgccgtaagttctgagtacggaaaagggaaagaatatggcaacatcgccgctgcggctagcacctacacacctgaaggcccgcttaaaaaggagtgggttaaaaaaaacgctgtgcaaatgcctctacaggctacaacggagaaggttcaacgctttcatttgagcgaggagagcgagcatattaacgtggaaaatctgcacatggtcaacaccagcgtgttcaccaaggcaaaagcttgcttactctacacaggcacgttaaaagagcagcagatgaagaattacttagattatctctcagcatctatctgcgccactataagcaacatcgaaaaagtcctacatgattactggacaactggtactcaacagtatcagtcctacggtctgtgggatgtgaagaaaaagaaatgggtgttgtgtccacccacggcaggtcatgcatggggggtcgcggctatcaaaggcaagcatcacattgtgatgctcaactttgacggtaatgatcaacctatctgtgataaggagtgggatttagtttgtgtcagcaatgatacaaaactattttccactatgaaaattttggaaaacctgcagggttgcaagatacaggaaccgaaggcaaagataacattagtggatggggttccgggatgtggaaaaactgccgaaatcttgagtaaggcagatttcaagcgtgatctgattatcacgcaaggaaaacaggcagccgctatgataagaaaaagggcaaacgccaatgatcctacgagaccagcaaacaacgataacgtgagaacggtggattcgtttttaatgaatccgaaaccatttgaatacaaagtcttgtggatcgatgaagggttaatgctgcacactggtgcaatcagtttttgcgtcgcactgagccattgtgaacagtgctacgtttttggagatacgcagcaaattccctttattaacagagtcatgaattttgattatccgaagaccttgcaaacgctggtcacggattctgtagagaaacggcggattacatcgcggtgtccgctagatgtgacctgttatctggcgcagaggtataagggacccgtggtgtcaacgaacaatgttgagaggtcccttgacacaaagctcgtggctggtgccgctcgctttgaacctcagcttacaccattaccgggcaaggtaataacttttacccaggctgataaagagacacttaaaaaacgcggatatcaagatgtgcatactgtgcacgaggtgcaaggtgagacctatactgaggtgtcgttagtgcgtctcacgccaacacccctgagcattatttcgcctgactctcctcatgtattagttagtttatctagacataaaaataggttagtttattataccgtagttaatgactgtattacttatgctataggtgagttagctaagttaaataattttatgtttgatatgtatactgtggagaatcagaaagcatagcaattacagcagcatcgcctctacatccacaaaaacatcttttgtcctactcctaaaaccggaaccatttctgacttacaggagtattacgataggtgtttacctgggaatagcttcgtccttaatgattacgatcgagtgtgtatgagactcgttgacaacacgttcaacgttgaaccatgcacactgactttaagtaaagctgaccctgtggaggcagagatgcgattaaatagcaagaattttttgactccattgttgcggactgctgtggaaaaacccagggtgcctgggttgttggagaatctcgttgctttaattaagaggaattttaattcccctgatttggctgggataatcgacaccaagcaggttgcaactaatgtagtcgataaattcttttctgattactttaccgtagaaggtttagatcatataaatagatgtagaaataataagtttttgtatagtaaagagaacctttctgtatggtacgataaacagcagccgcagtccattgggcagttggctaatgctgatttcatagatttccctagtgttgatgagtacaagcatatgatcaagactcaacccaagggaaaacttgactgcagcattcaatctgaatatcctgccctacagactatagtgtatcatagtaaacatgtaaatgctatttttggtcctatttttagtgaatttactagaataattttagaatccatagatactaacaaatttttcttttatactaggaaaactgtagaggacttggagttgtttttcagcgatctttctgattcaagcgacatggatgtcctggagcttgatataagcaaatatgataaatcgcaaaacgatttccacttctgtgtggaaatgctgatttgggaacgtctcggtatagacaattttgtcaaaagtatttgggagacgggccataagaaaacaactctgaaagattatcaggctggtataaaaactataatttaccaccagaggaaaagcggtgacgtaactacgttcatcggtaacaccttaatcatcgctgcatgcgtcagctctctattgccggttaaatcggtaattaaaggcgcgttttgcggtgatgattcggtattatactttccgaagggggtagatttaaccgatgtacaagccaatgctaatcttatgtggaatttcgaggcaaaactctttaggaaaaaatacggctatttctgtggtaaatacattattcaccactctaatggttgtatagtctacccggatccactgaagctgatacagaaactaggtaacaaatctttaacttctagggaacacgccgaggaatttagaatatcactttgtgatgtttcgaagtcccttggcaattgcgcatattttgatttgctggataaggccattgctgaagtgtttaaaggagcaggtggcggttcgtacgctttcagatcttattggaaacatataaccaaccccggcctttttaaaaccctttacgatgagtcttaa

SEQ ID NO: 612 - DNA, 7806 bp, Rubber tree latent virus 1
  source 1..7806: mol_type = other DNA
atggccttaagtggtattctttctttggatccagctttacaagtggatttctgtgaggtgactacagctttagatgacctttcacctaatgtgctgtacccacatacttcttatcaactctgtaccgaacctgaacttctttggggtaggtattctttctgtagattaactaaacattattttgtgagtaaattagtagattcatataaaactttagtatgtgtcaaaaatgcaatttctgttaatggtgtgcgtgatggtgctttcttttcttataaactatttcctggtgattgtgtgtctttagatagagtagagagtttgtcctatagtccaggtataccgtttagtatgtgtgattttattgttcttaggaatcagttacctttatatattaatactagtaatgctttagttacttctaatggatattgttatttacatctttttgattctcctcaacgcgactgtacttatctgtttgccattgctcaacgttttggtaagtacccatattttaaagatgtttataaccatttacactctctcaatgtgcgtgaggtacctgttatagtgaaggtagaacgcgatctttaccatgttttccctcaacaaagacgacaactgtcggaatactcgtacatactggatcttccaggagtacattacattggaggggacacatctggttttaatcttgcgcgttctgctcaacctatggctgatgtctcggttcatttgtctccagagagtactgctctacttgatgtggttggtttagtttctgaggagagtaagagcagttttgtgaagagtcttctcttagacaatcattgttttacgaggaagacgattgatgaaaaactcagtaaagatctatcaaatgtcagagggaagagaggacgaccttcagttgttattcataatgtcctttctcatgaagagttcaaacatcttgagtcagattatccagagtttacaattaaattcgaacaagatgttaaaactcctcatgcttatgcagcagctagtaggaaattggctcacagtctcattttcaaggaaattggtttcagaccagatagagttatgagcaacagacacatggttgatgtgattgatattggtgggaactggtacagtcatattgttgctgacagaccccgagtgcattgctgctgtcccattttgtctgttcaagatgatgtgcgagagaccactagaagaagatttttttctgaactgtctcgtccagtggagccaaaagtggagcgagagattcgtaaactgcgatccattgagtattttgaaaatccaaagacgcggtggcgaattcgttgtttgaaaaaggctcaacattgctcagtcacagcaccagtggcaacaatgattcattctgcttatgacatgactactgaagagattgcggattctatgacgcgtcataagtgtgcatttcttatgggggtgataatgttcactcctgagattatcattgaagagaagggtattctaccgtggttagattgtcagtttgatcggtcaagaggagatggtatgattcacttcaatttccgaggtgaagcatcttttggatacagtcacaaatgggagaattacagagaattactttcaaagaaagtttggtggaattcagagaaatcacaagcttatgtctgccaacttctactcaatagaacgggtgaacaatacttctctgttactctactgaacaatcctcagattcctcactctaaattgaatcacagggtgtggtttgataattctgaacagcttgtggtgaaattctggtcttttgatgttagagctagcactttgcagaaagccatggtacctaaacagtttatctgcgatcgttggacagcagataagataatgacgtatgctctacgtcaaacaacagaggctaagttcaatgctgcggaaattttttcatatgcagtggccatagattctaaggttattgttgatgggaccactgttatgcggggtaaacagacaaaaccagtagaactctttgatttagcgcatgcgatctatattcaggcatatgttcagcgctacaacagtggtcgggttgataaggcagttcttgatggtattaaggctgaacgagaattatcctcagccggccttttcaagaaatttacaatgttgttcaggaaaggtggttcgaatggttatttgacaagatttcatgatttactgaaccactgggtagtactacctgaattattcccagtatctatctcaaaagctattgagtatgttcaatttgatgagatagtggaaccctttcttaacccacctgaagtttcacaagaattggagaggggtcctttacgaccagaaccaggtgcgcaaatcagagcaacacttcacttagctgaatcagataaggagtcagaagatgaagatgaggatgataaagggtcaaatgtatcttggggcggtctacttccaaccccttccagaggggagaaaagaaagtcaggaaaacctcttgatactttgtcacaggattcgggtagtgaggagaaacaggatcagggggagaagtaccaatggaaaattaaggatattcaagaattctccatttctgcagaaacatggtctctagattcttgtagaaatttctatctggttttcagagatcctgtcaaggaattgcatcttcatagaggtacaagacttttaattcattctgaagtgaaatcacagttacttcctagaagtctagtggttgaactcactccttgttcacctgtacctattgaggagattgtggatggtttcagactcctttccaaagttgaaatcagagatttatttgaactggggttaatagttcttaatgaagatttattttctaaacaatcacatggtccttataagaaaggtcttacttttgaggaattcgtccaaagtctactccctctaagaagagcagttaaggtyggtagatgtgtggggaaaactgttggagctgcattagattcatttgcacatgcagttttacctttagctggtggtgggacgactgtggattccacctacaacaaggctctgagggttccaaagaagatccctactcttcatgctgcggttgcgcttaaaaaccctcttattcggagttctaaggaggagcaagtggtttctacggatgacatcactcagagtactaaggggaaagcagtggtttctgcagaggtgaaagagaagaaaagtgagattgctgattcgggaaaagaaccccagcgtattcaagaggtggttgagattaagtcatcagatgatgagagatctacaacatcagaggtacaacccatgatcataagttctgattctgaagaggagcatatcatagtcaaaccatctcaggaactggtggtggctgagcagaaagcagttttttatggacctgaaatcccacctgagaattcttcttggcaggtaccaataaatatgggtaagtgtcagtgcggtgatcactggcgtatttctgtgaaggctgatggtaattgcttctactatgctttgaaaagactactaccatttcttggttcagtggaggaaatgaaggaaatcctgaaggaaggtctccatgagtttgattatggtgttgcgcgatatctaaggaggattttggatatcccctttcattatgccgaacctgcttgtgtacaacttgcggctaatgtgtttgagcgggatttgtggattcatgaatcttttgactctcctgaaattcaaatcgtcaagagttctaagccagcaaaaggacacctgtgcatacttcttgaaagagctcattttacacctctcttgtgtcataaagaaaaggttctttggtctgagatagttgatgttcccagtacaacatctgagtctgatacctcgattcaggaaagggagtcgaggcgagagaaagagaagggaatggaagtaattcagtctagtgtatcaaatcaggagaggtcctattattaccaaatagagcaactgtcaaattctatgagtctcttcaaacaattacaccgtactaaaccaactctcatcaagaactttccaacagatagtatggtgttcccctttttagaagcgaagagattacggaggaggaaggctcttttttattgtgcaaataaggactgggtctatggacatgataaggtgatttatcagaatggtggttggccggaagatattgctcgtttagctgagcgattcaggtgtaacagtgttttaatacaaatatatgagaaaggagcaactattccaccacataaagatgatgaagcggtctatgatcttgcagacaaccccgtgtttacagtaaattttctgggttcagcaaaattttcttttggagaaaataaaaaggaactacacagcgtagatcttactgcaggagatttacttgtgatgccacctgcttatcagaagaaacattttcattcagtggagagtctttctgaaggtagaattagtctgacgttcagacgccaaaagagaaatcttcctggatatggtcagaccactgttactgaagaatggcagaagaagcagaaagtagaacaggagactactgaagtggtgaaagaaatctccggtggaggaacttggggaaagacgcgtaagcgttcaacaatcaagagaagtcacacaaagggcctgcacttagataagttttcaaacacgaaaacctattctgagatatatgcatcggaattaaaacatctttctgagattgagcaacgcaggtgggctgaattttctcccaagttgaacaataatactttgaagaatgaggtccatagaaatttggtgaatgcacttggagaggtgatggagtactggagggtccatgatgaagttcttcgtagacgtcttcgtgatatctacgtgaggataccaacatcgataatagatacttcttcaagtacagtagcacaacttaaggaacgcggtccaaataaaagagatgtggaggctgctctaaagcgcaatggaattaagacttttgaggtctcaatctgggatacccatcataatcgttggttgtggcaagctgaaggtattcacgattatgagggttgttttgatggtgaatcaattctggagatacccatggaactcaaagcagatctggataagactaaagatcctcgtgaatatacctctctcttcgatatggaactacccttcaggtggttgttattaacgaaagagaccgttcttcttcagagcggtaagttctacaaggtggcaatgaacgaggtgaagcaggctactgattgggtaccacctttgatagattttgtacagggtgttccaggttgtgggaaaacaagttacatccttcgtaaccataagaggagtgtgtggcctccttttaaaaagattctgggggagaagaaatacacaagaaaaccgtctgtgcttggtgatttagttttaactactacccgtgagggagcacatgacatcagaaagcggttaagagatagtggagaggaggtgtacgacaagcaatataggactcttgattcatatattctgaattgttcaataccttttgaagaagtatgggtcgatgaagctctaatgcagcatgctggtgctttggtgttagtggccttgaagactcgctgtaaagtacttcatcttatgggtgatcgtgctcagatagactttatcccacgcatgggtgatgttactcttaggttttgttcaatgggtgatctagtacccacatcaaaaatactgaacactacctatagatgtcctgtagatgtagccgctatcttgagtgaacactatgaacagggtatggtttccacatcaaaagtgcgggaatctatgaaagttgagaggataacagatgcaggacaggttcctaaagaagatgatgcgacatatcttacttttaaacaggcagagaaatttgaacttgtgaagaaaggtttcaaaaatgtgcatacaattcatgaatttcaaggtcttcaaacagataaagtgtacattgttagaacatctcataaaccagctgaagagatttattcctcaatgggtcatattcttgtggctatgagtagacatagggaactactggtttattttacacctgttctacttgattctctggcaaagaagatgttgaagagaccaacagcagcgcaactacaggcagcatcccttcaggttgatgtaccatcaaagagtactagggggggtttttcaactttgtttcctgttgctgaggaaaagaaaattcatagttctacacctcttagcacttcacctattgaatcattgcagacttggtatgatgatacttgtcctggggaggcaacatttgttggtatttatgatcaacaaatggtttttgatgctgatctagcaattgcagtgggaaagagcggaattgatgtgtcaagggtacgccctctgaaaaacagcagaccaactttacgaccaaatttgagaacttcgatgcaacctattaggagaagtggggtgaaagaaactctcttggcttacttcaaacgcaatgctaatgtaccatctctatcgggagacgtagaccccgaggagttgtcgcagcgcatggtggaaatttttgaagagagttacttagacaagaatctgaaaactcactatgcttctatgcggttagaaagaattggttgtaattcaaagcgaattcagaaatggatggatggacactctgatttcacttccaagtgcgagtggccaccttcgatttatgagcatgccaatgatctctacaggtatatggtgaagcgcacagttaaaccagcttttgacggcactaatatgagtgaatataaagctgtacagactatagcctatttggctaaagatgttaatgcagttttctgccccattgtcagagagatgactgaacgtctgcaatccgttctcgatagaagatttattcttttttcaatgatgagtcctgaagagttcgcgagtaggatggaaacacttattgaacctcgcaatgttcacaagtactttaagaaagaagttgacttttctaagtacgacaaatctcaaggtgaagtgttacatctttttgagaagaaaatgtatgcgcgtctagggttttcaggtgagttggctgatttgtattgggcagcgcatgtgtattcaaagtataaagatttcgataatggatttgatgctggtatttggtttcagagaaggacaggtgatgctgcaactttcctaggcaacgccttggttgttatgggtgttttggcctgtgtgtttaatatgcaagaaactcatgctggggcctttgctggtgatgactcgattttgttttctactgaagatatatatagtatagataagagttttatagcgtctcagttgtttaatttagagtctaagttttttacgtttaaaagtgtgtatttttgttcaaaatttttattgaatgtaaatgatagatttgtgtttttacctgatccgatgaaattggtcacaaaactaggaagaacagatttggttgattggattcatttggaggagtactacacttcaatcaaggatctttgtaaagagtactcaaatttttgtattgaaccaagtctaagtgcagctcttaaagaacgttatcctagaactcataattcatcaggatatctcatatctgcactttggtcagtacttaaagattttgaaagtttctcacagttgttctctgaaccacctgagggacttcttattgatcctagtagaccaaatttataa

SEQ ID NO: 613 - DNA, 1083 bp, Arabidopsis thaliana
  source 1..1083: mol_type = other DNA
atggctactgggcaggttctgtttcagcgattctattgcaagaagtctttggctaaatttgatgtcaagatagttgctgccagctgtgtatggcttgcatcaaaactggaagaaaaccctaaaaaagctagacaggtcatcatcgtattccacaggatggagtgtcgcagggagaacttgccattagaacatctggatatgtatgccaagaagttctctgagttgaaagttgaattaagcagaactgagagacatatactgaaagagatgggttttgtttgtcatgttgaacatcctcacaagttcatatcaaactaccttgccacattagaaacacctccagaattgaggcaagaagcttggaatttggccaatgatagtctgcgtacaaccctctgtgtaaggttcagaagtgaggttgtggcttgtggggtagtgtatgctgctgctcgtaggtttcaagtaccactccctgagaatccgccgtggtggaaagcatttgatgcagataaatctagtattgacgaagtgtgtagagttcttgctcatttatacagtcttccaaaggctcagtatatctctgtttgcaaggatgggaagccatttacattttctagcaggtccgggaattctcaaggtcaatcagcgacaaaggatctgttgccgggagcaggcgaggctgttgatactaaatgtactgcaggatcagctaataacgacttgaaggatggaatggttactacaccacacgaaaaggctacagattccaagaaaagtggtaccgagtcaaactctcagccaattgtaggagactcaagctatgaaagaagtaaagtaggagatagagaaagagagagtgatagagagaaggaacgaggtagagagagggacaggggtaggtctcacagaggcagagattctgacagagacagtgatagggagagagacaaactcaaagatcgaagtcatcatcggtcaagagacagattgaaggattcaggtggacattcagataaatcaaggcatcattcttctcgggaccgtgactaccgcgactcatcgaaagaccgtcgtaggcaccat

SEQ ID NO: 614 - DNA, 2586 bp, Solanum lycopersicum
  source 1..2586: mol_type = other DNA
atggctgaaattcttcttacatcagtaatcaataaatctgtagaaatagctggaaatttactgattcaagaaggaaagcgtttatattggttgaaagaggatatcgattggctccagagagaaatgagacacattcgatcttatgttgacaacgcaaaggccaaggaagctggaggtgattcaagggtcaaaaacttattgaaagatattcaagaattggcaggtgatgtggaggatctcttagatgacttccttccaaaaattcaacaatccaataagttcaattattgccttaagaggagttcttttgcagatgagtttgctatggagattgagaagataaagagaagggttgttgacattgaccgaataaggaaaacttacaacatcatagatacagataacaataatgatgattgtgttctgctggatcggagaagattattcctacatgctgatgaaacagagatcatcggtttggatgatgacttcaatatgctacaagccaaattacttaatcaagatttgcattatggagttgtttccatagttggcatgcccggtctggggaaaacaactcttgccaagaaactttataggctcattcgtgatcaatttgagtgttctggactggtctacgtttcacaacagccaagagcgagtgaaatcttacttgacattgccaaacaaattggactgacggaacagaaaatgaaggaaaatttggaggacaacctgcgatcactcttgaaaataaaaaggtatgttatcctcctagatgacatttgggatgtggaaatttgggatgatctgaaacttgtccttcctgaatgtgattcaaaagtcggcagtagaatgataatcacgtctcgaaatagtaatgtaggcagatacataggaggggaatcctccctccatgcattgcaacccctagaatccgagaaaagctttgaactctttaccaagaaaatctttaattttgatgataataatagttgggccaatgcttcacctgacttggtgaatattggtagaaatatagttgggagatgtggaggtataccgctagccatagtggtgactgcaggcatgttaagggcaagagaaagaacagaacatgcgtggaacagagtacttgagagtatgggccataaagttcaagatggatgtgctaaggtattggctctcagttacaatgatttacctattgcctcaaggccatgtttcttgtactttggcctttaccccgaggaccatgaaattcgtgcttttgatttgataaatatgtggattgctgagaagtttatagtagtaaatagtggtaataggcgagaggctgaggatttggcggaggacgtcctaaatgatttggtttctagaaacttgattcaacttgccaaaaggacatataatggaagaatttcaagttgtcgcatacatgacttgttacatagtttgtgtgtggacttggctaaggaaagtaacttctttcacaccgcgcatgatgcatttggtgatcccggcaatgttgctaggctccgaaggattacattctactctgacaatgtcatgattgagttcttccgttcaaatcctaagcttgagaagcttcgtgtacttttctgtttcgcaaaagacccttccatattttctcatatggcttattttgacttcaaattgttgcacacattggttgtagtcatgtctcaaagttttcaagcatatgtcactatcccaagcaaatttgggaacatgacttgcttacgctatctgagattggaggggaatatttgtggaaaactgccaaatagtattgtcaagctcacacgtctagagaccatagacattgatcgacgtagcctcattcaacctccttctggtgtttgggagtctaaacatttgagacatctttgttatagagattatggacaagcatgtaacagttgcttttctataagctcattttacccaaatatttactcattgcatcctaacaatctacaaaccttgatgtggatacctgataaattttttgaaccgaggttgttgcaccgattgatcaatttaagaaaactgggtatactgggagtgtccaattctaccgttaagatgttatcaatatttagccctgtgcttaaggcgctggaggttctgaagctcagtttttccagtgacccgagtgaacaaataaagttgtcatcgtatccacatattgctaagttgcatttgaatgttaacagaacaatggccttgaactctcaatcatttcctccaaatctcatcaagcttactctagcctactttagtgtagaccgttatatactggcagtacttaagacatttcccaaattaagaaaacttaaaatgttcatctgcaagtataatgaagaaaagatggatctctcgggcgaggcaaatggttatagctttccgcaacttgaagttttgcatattcatagcccgaatgggttgtctgaagtaacgtgcacggatgatgtcagtatgcccaaattgaaaaagctgttacttacaggattccattgccgaatcagtttatcggaacggcttaaaaagctgagtaaatga

SEQ ID NO: 615 - DNA, 3156 bp, Solanum tuberosum
  source 1..3156: mol_type = other DNA
atggcttatgctgctgttacttcccttatgagaaccatacatcaatcaatggaacttactggatgtgatttgcaaccgttttatgaaaagctcaaatctttgagagctattctggagaaatcctgcaatataatgggcgatcatgaggggttaacaatcttggaagttgaaatcgtagaggtagcatacacaacagaagatatggttgactcggaatcaagaaatgtttttttagcacagaatttggaggaaagaagcagggctatgtgggagatttttttcgtcctggaacaagcactagaatgcattgattccaccgtgaaacagtggatggcaacatcggacagcatgaaagatctaaaaccacaaactagctcgcttgtcagtttacctgaacatgatgttgagcagcccgagaatataatggttggccgtgaaaatgaatttgagatgatgctggatcaacttgctagaggaggaagggaactagaagttgtctcaatcgtagggatgggaggcatcgggaaaacaactttggctacaaaactctatagtgatccgtgcattatgtctcgatttgatattcgtgcaaaagcaactgtttcacaagagtattgtgtgagaaatgtactcctaggccttctttctttgacaagtgatgaacctgatgatcagctagcggaccgactgcaaaagcatctgaaaggcaggagatacttggtagtcattgatgacatatggactacagaagcttgggatgatataaaactatgtttcccagactgttataatggaagcagaatactcctgactactcggaatgtggaagtggctgaatatgctagttcaggtaagcctcctcatcacatgcgcctcatgaattttgacgaaagttggaatttactacacaaaaagatctttgaaaaagaaggttcttattctcctgaatttgaaaatattgggaaacaaattgcattaaaatgtggaggattacctctagcaattactgtgattgctggacttctctccaaaatgggtcaaagattagatgagtggcaaagaattggggaaaatgtaagttcggtcgttagcacagatcctgaagcacaatgcatgagagtgttggctttgagttaccatcacttgccttctcacctaaaaccgtgttttctgtattttgcaattttcacagaggatgaacagatttctgtaaatgaacttgttgagttatggcctgtagagggatttttgaatgaagaagagggaaaaagcatagaagaggtggcaacaacatgtataaacgaacttatagatagaagcttaattttcatccacaattttagttttcgtggaacaatagaaagttgtggaatgcatgatgtgacccgtgaactctgtttgagggaagctcgaaacatgaattttgtgaatgttatcagaggaaagagtgatcaaaattcatgtgcacaatccatgcagcgttcctttaagagtcgaagtcggatcagaatccataaggtggaagaattggcttggtgtcgtaacagtgaggctcattctattatcatgttgggtggattcgaatgcgtcacactggaattgtctttcaagctagtaagagtactagatcttggtttgaatacatggccaatttttcccagtggagtactttctctaattcatttgagatacctatctttgcgttttaatccttgcttacagcagtatcaaggatcgaaagaagctgttccctcatcaataatagacattcctctatcgatatcaagcctatgctatctgcaaacttttaaacttaaccttccatttcccagttattatcctttcatattaccatcggaaattttgacgatgccacaattgaggacgctgtgtatgggctggaattacttgcggagtcatgagcctacagagaacagattggttttgaaaaatttgcaatgcctcaatcaattgaaccctcggtattgtacagggtctttttttagactatttcccaatttaaagaagttgcaagtatttggcgtcccagaagactttcgcaatagccaggacctgtatgattttcgctacttatatcagctcgaagaattgacatttcgtttatattatccatatgctgcttgctttctaaaaaacactgcaccttcaggttctacgcaagatcctctgaggtttcagacggaaatattgcacaaagagattgatttcgggggaactgcacctccaactttactcttacctcctccggatgcttttccacaaaaccttaagagtttaacttttaggggagaattctctgtggcatggaaggatttgagcattgttggtaaattacccaaactcgaggtccttatactatcatggaatgccttcataggcaaggagtgggaagtagttgaggaagggtttcctcacttgaagttcttgtttctggatgatgtatacattcgatactggagagctagtagtgatcactttccgtaccttgaacgagttattcttagagattgccgtaatttggattcaatccctcgagattttgcagatataaccacactagctcttattgatatagattactgtcaacaatctgttgtgaattccgccaagcaaattcaacaggacattcaagacaactatggaagctctatcgaggtccatactcgtcatcttttgtaagacatcttcttccttgctttacaacaataattaactcatcatcatagtaaactcgataataatctggataatagccttagtaagtcaaattgcaccaattcaacaaaagttcttgatgctgtcattgtgtttgatttgaatccttccaatattgtgtaacttgttatacttgcatgttcattcttgattttgggaagtgtaacatttcatttttcatcttttgtggctagcattcccaagagtgtgacaacagttgaagatgatgatgatagtgtgacaacagatgaagatgatgatgatgatgactttgagaaagaagttgcttcttgccgcaataatgtgtaagttcttatacctgcatgctcattcttgctataatgttctcttgttccttaattatgggacatctgacatattattttccatgttttgcgtcttttatttttctgcagcgag

SEQ ID NO: 616 - DNA, 480 bp, Tobacco mosaic virus
  source 1..480: mol_type = other DNA
atgtcttacagtatcactactccatctcagttcgtgttcttgtcatcagcgtgggccgacccaatagagttaattaatttatgtactaatgccttaggaaatcagtttcaaacacaacaagctcgaactgtcgttcaaagacaattcagtgaggtgtggaaaccttcaccacaagtaactgttaggttccctgacagtgactttaaggtgtacaggtacaatgcggtattagacccgctagtcacagcactgttaggtgcattcgacactagaaatagaataatagaagttgaaaatcaggcgaaccccacgactgccgaaacgttagatgctactcgtagagtagacgacgcaacggtggccataaggagcgcgataaataatttaatagtagaattgatcagaggaaccggatcttataatcggagctctttcgagagctcttctggtttggtttggacctctggtcctgcaacttga

SEQ ID NO: 617 - DNA, 795 bp, Soybean mosaic virus
  source 1..795: mol_type = other DNA
tcaggcaaggagaaggaaggagacatggatgcaggtaaggatccaaagaagaataccagcagtagcaaaggagctggtacaagcagcaaagatgtaaatgttggatcaaaaggaaaggtggttccgcgtttgcagaagattacaaggaagatgaatcttccaatggttgaagggaagatcattcttagcttggaccacttgcttgagtacaaacctaatcaggttgatttattcaatactcgagcaacaagaacacagtttgaagcgtggtacaatgcagttaaagatgaatatgagcttgatgatgagcagatgggtgtggtcatgaatggtttcatggtttggtgtattgacaatggcacttctccagatgccaatggcgtgtgggtgatgatggatggagaggaacagattgaatatccgctgaagccaattgtcgaaaatgcaaaaccaactttgagacaaatcatgcatcatttttcagatgcagcagaagcttacattgagatgagaaattctgaaagtccgtatatgcctagatatggactgttaaggaatttgagagatagagagctagcccgctatgcttttgacttctatgaggtcacttctaaaacaccaaacagggcaagggaagcaatagcgcaaatgaaggctgcagctctctcgggagttaacaacaagttgtttggacttgatggaaatatctcaaccaactccgaaaatactgaaaggcacactgcaagggatgtgaatcaaaacatgcacactcttctgggcatgggcccaccgcag

SEQ ID NO: 618 - DNA, 654 bp, Cucumber mosaic virus
  source 1..654: mol_type = other DNA
atggacaaatctgaatcaaccagtgccggtcgtaatcgtcgacgtcgtctgcgtcgcggttcccgctccgcctcctcctccgcggatgctacatttagagtcctgtcgcaacagctttcgcgacttaataagacgttagcagctggtcgtcctactattaaccacccaacctttgtgggtagtgagcgttgtaaacctggatacacgttcacctcgattaccctgaagccaccgaaaatagacaaggggtcttattatggcaaaaggttgttacttcctgattcagtcactgagttcgataagaagcttgtttcgcgcattcaaattcgagttaatcctttgccgaaatttgattctaccgtgtgggtgacggtccgtaaagttcctgcctcctcggacctgtctgtatccgccatctctgctatgtttgcggacggagcctcaccggtactggtttatcagtatgctgcatctggcgttcaagccaataacaaattgttatatgatctttcagtgatgcgcgctgatattggtgacatgagaaagtacgccgtgctcgtgtattcaaaagacgatgcgcttgagacggacgaactagtacttcatatcgacatcgagcaccaacgcattcccacgtctggggtgctcccagtt

SEQ ID NO: 619 - DNA, 708 bp, Potato virus X
  source 1..708: mol_type = other DNA
atgactacaccagccaacaccactcaagctgtaggatccaccaaatcaactaccaccaccactgcaggcgcaactcctgccaattcagggctattcaccataccagatggggacttcttcagcaccgcaaaggctgtggtcgctagcaatgccgtggccaccaacgaggatctcgccaaaatacaggaaatctggaaggacaagaaaattccttcagacactatggctcaggcagcttgggacttagtgagacactgtgccgacgtcgggtcctctgcccaaactgaaatgataggcaccggtccatactccaatggggtcagccgggctagactggcagctgcaattaaagaggtgtgcacactgaggcagttctgcaaaaagtatgcccccgtggtctggaactggatgctcacaaacaacagcccaccggccaactggcaggcacaaggcttcaagccggagcacaaattcgcagcctttgacttctttgatggagtcactaatcccgcagctatcactcccaaagaggggctcatgagacctccgtctgaagcagaaatgaatgccgcccaaactgctgcctttgtgaagatcaccaaggcgagggcgcaatccaacgactttgccagtctggatgccgcggtcactaggggccgcatcacaggaacgactgttgcagaagcagttgtttcactacccccacca

SEQ ID NO: 620 - DNA, 774 bp, Tomato spotted wilt virus
  source 1..774: mol_type = other DNA
atgtctaaggttaagctcactaaggaaagcattgttgctttgttgacacaaggcaaagaccttgagtttgaggaagatcagaatctggtagcattcaacttcaagactttttgtctggaaaacatcgaccagatcaagaagatgagcgttatttcatgtctgacattcctaaagaatcgtcagagcataatgaaggttattaagcaaagcgattttacttttggtaaaattaccataaagaaaacttcagacaggattggaggcactgacatgaccttcagaaggcttgatagcttgatcagggtcaggcttgttgaagaaactgggaattctgagaatctcaatactatcaaatctaagattgcttcccatcctttgattcaagcctatggattacctctcgatgatgcaaagtctgtgagacttgccataatgctgggaggtagcttacctcttattgcttcagttgatagctttgagatgatcagtgttgtcttggctatatatcaggatgcaaaatacaaggacctcgggatcgacccaaagaagtatgacaccaaggaagccttaggaaaagtttgcactgtgctgaaaagcaaagcatttgaaatgaatgaagatcaggtgaagaaggggaaagagtatgctgctatacttagctccagcaatcctaatgctaaagggagtgttgctatggaacattacagtgaaactcttaacaagttctatgaaatgttcggggttaaaaagcaggcaaaactcgcagaacttgct

SEQ ID NO: 621 - DNA, 777 bp, Glycine max
  source 1..777: mol_type = other DNA
atgagtggtagcaacgatggtagcggcagctggagctctaggtttttgaaggtggctagtgcagctgccgctacagccgccgttgccggcggtttatatgccattctttcatcctcaacctctgctagctctgagatggaagtgccgtttggcagcgcacggcctgagagcaacactaagcgacaacaagagtcattctatgagcacgaagaaactgaggatgacgaagaatctgaggaggcagacaatgggaaatggaagaaacctgagagtggttgggtgaagctgaatgtggatggttcacgtattcatgaagaacccgcctctgcgggttgtggtggggttataagggacgaatggggaacatggtgcgtgggctttgatcagaaattggaccccaacatttgtcgacaagcccattatacagagttacaagctattctaacgggcctgaaggtggctcgggaggacatgatcaatgtggaaaaactggttgtggagtcagacagtgagcccgcggtgaacatggtgaagagtgggcttgggtacaagtatcatcgtccagagtataaggttgttcaagacataaataggcttcttaaagatcctaagtggctagcgaggttggattatgttcctaggaaagctaatcgagtcgctaattacctcgccaagcgtgtttgtaaaccgtcttctcctcatgatcatcatcatttcagcaagtatccttgtcccccggattacgattgtgaaaagattttcttggaggataacaat

SEQ ID NO: 622 - protein, 361 aa, Arabidopsis thaliana
MATGQVLFQRFYCKKSLAKFDVKIVAASCVWLASKLEENPKKARQVIIVFHRMECRRENLPLEHLDMYAKKFSELKVELSRTERHILKEMGFVCHVEHPHKFISNYLATLETPPELRQEAWNLANDSLRTTLCVRFRSEVVACGVVYAAARRFQVPLPENPPWWKAFDADKSSIDEVCRVLAHLYSLPKAQYISVCKDGKPFTFSSRSGNSQGQSATKDLLPGAGEAVDTKCTAGSANNDLKDGMVTTPHEKATDSKKSGTESNSQPIVGDSSYERSKVGDRERESDREKERGRERDRGRSHRGRDSDRDSDRERDKLKDRSHHRSRDRLKDSGGHSDKSRHHSSRDRDYRDSSKDRRRHH

SEQ ID NO: 623 - protein, 1246 aa, Solanum peruvianum
MAENEIEEMLEHLRRIKSGGDLDWLDILRIEELEMVLRVFRTFTKYNDVLLPDSLVELTKRAKLIGEILHRLFGRIPHKCKTNLNLERLESHLLEFFQGNTASLSHNYELNNFDLSKYMDCLENFLNDVLMMFLQKDRFFHSREQLAKHRSIKELKIVQKKIRFLKYIYAPEINGYVDYEKQECLENRIQFMTNTVGQYCLAVLDYVTEGKLNEENDNFSKPPYLLSLIVLVELEMKKIFHGEVKASKFTQSKTFKDKKLPKGFSHHLHNLLMYLRNKKLENFPNNIAAQNIDVAIEFLLVFLDADVSNHVINGNWLKEVLLKVGAIAGDILYVIQKLLPRSINKDETSNISLCSIQILEKTKDLKAQVETYYKSLKFTPSQFPTFGGLSFLNSLLRKLNEMSTSKSGLGFLMKPLLGNLEKELSSLTSILEKELSSIFRDVVHHEHNIPKDLQRRTINLSYEAEVAIDSILAQYNAFLHIFCSLPTIVKEIKQINAEVTEMWSADIPLNPHYVAAPLKHLPDRHSNLVTDEEVVGFENKAEELIDYLIRGTNELDVVPIVGMGGQGKTTIARKLYNNDIIVSRFDVRAWCIISQTYNRRELLQDIFSQVTGSDDNGATVDVLADMLRRKLMGKRYLIVLDDMWDCMVWDDLRLSFPDDGIRSRIVVTTRLEEVGKQVKYHTDPYSLPFLTTEESCQLLQKKVFQKEDCPPELQDVSQAVAEKCKGLPLVVVLVAGIIKKRKMEESWWNEVKDALFDYLDSEFEEYSLATMQLSFDNLPHCLKPCLLYMGMFSEDARIPASTLISLWIAEGFVENTESGRLMEEEAEGYLMDLISSNLVMLSKRTYKGRVKYCQVHDVVHHFCLEKSREAKFMLAVKGQYIHFQPSDWKGTRVSFSFSEELSKFASLVSKTQKPFHQHLRSLITTNRAKSINDIFSCQISELRLLKVLDLSSYIVEFLSLATFKPLNQLKYLAVQAFEFYFDPGSHLPHIETFIVMNLPYYDILLPVSFWEMKKLRHAHFGKAEFDKQGLSEGSSKLENLRILKNIVGFDRVDVLSRRCPNLQQLQITYFGNNEEPFCPKLENLTQLQQLQLSFARPRTLSGLQLPSNLNKLVLEGIHIGCVIPFIAGLPSLEYLQLHDVCFPQSEEWCLGDITFHKLKLLKLVKLNISRWDVSEESFPLLETLVIKKCIDLEEIPLSFADIPTLEQIKLIGSWKVSLEDSAVRMKEEIKDTEGCDRLHLVKQRSD

SEQ ID NO: 624 - protein, 861 aa, Solanum lycopersicum
MAEILLTSVINKSVEIAGNLLIQEGKRLYWLKEDIDWLQREMRHIRSYVDNAKAKEAGGDSRVKNLLKDIQELAGDVEDLLDDFLPKIQQSNKFNYCLKRSSFADEFAMEIEKIKRRVVDIDRIRKTYNIIDTDNNNDDCVLLDRRRLFLHADETEIIGLDDDFNMLQAKLLNQDLHYGVVSIVGMPGLGKTTLAKKLYRLIRDQFECSGLVYVSQQPRASEILLDIAKQIGLTEQKMKENLEDNLRSLLKIKRYVILLDDIWDVEIWDDLKLVLPECDSKVGSRMIITSRNSNVGRYIGGESSLHALQPLESEKSFELFTKKIFNFDDNNSWANASPDLVNIGRNIVGRCGGIPLAIVVTAGMLRARERTEHAWNRVLESMGHKVQDGCAKVLALSYNDLPIASRPCFLYFGLYPEDHEIRAFDLINMWIAEKFIVVNSGNRREAEDLAEDVLNDLVSRNLIQLAKRTYNGRISSCRIHDLLHSLCVDLAKESNFFHTAHDAFGDPGNVARLRRITFYSDNVMIEFFRSNPKLEKLRVLFCFAKDPSIFSHMAYFDFKLLHTLVVVMSQSFQAYVTIPSKFGNMTCLRYLRLEGNICGKLPNSIVKLTRLETIDIDRRSLIQPPSGVWESKHLRHLCYRDYGQACNSCFSISSFYPNIYSLHPNNLQTLMWIPDKFFEPRLLHRLINLRKLGILGVSNSTVKMLSIFSPVLKALEVLKLSFSSDPSEQIKLSSYPHIAKLHLNVNRTMALNSQSFPPNLIKLTLAYFSVDRYILAVLKTFPKLRKLKMFICKYNEEKMDLSGEANGYSFPQLEVLHIHSPNGLSEVTCTDDVSMPKLKKLLLTGFHCRISLSERLKKLSK

SEQ ID NO: 625 - protein, 937 aa, Solanum tuberosum
MAYAAVTSLMRTIHQSMELTGCDLQPFYEKLKSLRAILEKSCNIMGDHEGLTILEVEIVEVAYTTEDMVDSESRNVFLAQNLEERSRAMWEIFFVLEQALECIDSTVKQWMATSDSMKDLKPQTSSLVSLPEHDVEQPENIMVGRENEFEMMLDQLARGGRELEVVSIVGMGGIGKTTLATKLYSDPCIMSRFDIRAKATVSQEYCVRNVLLGLLSLTSDEPDDQLADRLQKHLKGRRYLVVIDDIWTTEAWDDIKLCFPDCYNGSRILLTTRNVEVAEYASSGKPPHHMRLMNFDESWNLLHKKIFEKEGSYSPEFENIGKQIALKCGGLPLAITVIAGLLSKMGQRLDEWQRIGENVSSVVSTDPEAQCMRVLALSYHHLPSHLKPCFLYFAIFTEDEQISVNELVELWPVEGFLNEEEGKSIEEVATTCINELIDRSLIFIHNFSFRGTIESCGMHDVTRELCLREARNMNFVNVIRGKSDQNSCAQSMQRSFKSRSRIRIHKVEELAWCRNSEAHSIIMLGGFECVTLELSFKLVRVLDLGLNTWPIFPSGVLSLIHLRYLSLRFNPCLQQYQGSKEAVPSSIIDIPLSISSLCYLQTFKLNLPFPSYYPFILPSEILTMPQLRTLCMGWNYLRSHEPTENRLVLKNLQCLNQLNPRYCTGSFFRLFPNLKKLQVFGVPEDFRNSQDLYDFRYLYQLEELTFRLYYPYAACFLKNTAPSGSTQDPLRFQTEILHKEIDFGGTAPPTLLLPPPDAFPQNLKSLTFRGEFSVAWKDLSIVGKLPKLEVLILSWNAFIGKEWEVVEEGFPHLKFLFLDDVYIRYWRASSDHFPYLERVILRDCRNLDSIPRDFADITTLALIDIDYCQQSVVNSAKQIQQDIQDNYGSSIEVHTRHLFIPKSVTTVEDDDDSVTTDEDDDDDDFEKEVASCRNNVE

SEQ ID NO: 626 - protein, 159 aa, Tobacco mosaic virus; identical to SEQ ID NO: 26

SEQ ID NO: 627 - protein, 265 aa, Soybean mosaic virus
SGKEKEGDMDAGKDPKKNTSSSKGAGTSSKDVNVGSKGKVVPRLQKITRKMNLPMVEGKIILSLDHLLEYKPNQVDLFNTRATRTQFEAWYNAVKDEYELDDEQMGVVMNGFMVWCIDNGTSPDANGVWVMMDGEEQIEYPLKPIVENAKPTLRQIMHHFSDAAEAYIEMRNSESPYMPRYGLLRNLRDRELARYAFDFYEVTSKTPNRAREAIAQMKAAALSGVNNKLFGLDGNISTNSENTERHTARDVNQNMHTLLGMGPPQ

SEQ ID NO: 628 - protein, 218 aa, Cucumber mosaic virus
MDKSESTSAGRNRRRRLRRGSRSASSSADATFRVLSQQLSRLNKTLAAGRPTINHPTFVGSERCKPGYTFTSITLKPPKIDKGSYYGKRLLLPDSVTEFDKKLVSRIQIRVNPLPKFDSTVWVTVRKVPASSDLSVSAISAMFADGASPVLVYQYAASGVQANNKLLYDLSVMRADIGDMRKYAVLVYSKDDALETDELVLHIDIEHQRIPTSGVLPV

SEQ ID NO: 629 - protein, 236 aa, Potato virus X
MTTPANTTQAVGSTKSTTTTTAGATPANSGLFTIPDGDFFSTAKAVVASNAVATNEDLAKIQEIWKDKKIPSDTMAQAAWDLVRHCADVGSSAQTEMIGTGPYSNGVSRARLAAAIKEVCTLRQFCKKYAPVVWNWMLTNNSPPANWQAQGFKPEHKFAAFDFFDGVTNPAAITPKEGLMRPPSEAEMNAAQTAAFVKITKARAQSNDFASLDAAVTRGRITGTTVAEAVVSLPPP

SEQ ID NO: 630 - protein, 258 aa, Tomato spotted wilt virus
MSKVKLTKESIVALLTQGKDLEFEEDQNLVAFNFKTFCLENIDQIKKMSVISCLTFLKNRQSIMKVIKQSDFTFGKITIKKTSDRIGGTDMTFRRLDSLIRVRLVEETGNSENLNTIKSKIASHPLIQAYGLPLDDAKSVRLAIMLGGSLPLIASVDSFEMISVVLAIYQDAKYKDLGIDPKKYDTKEALGKVCTVLKSKAFEMNEDQVKKGKEYAAILSSSNPNAKGSVAMEHYSETLNKFYEMFGVKKQAKLAELA

SEQ ID NO: 631 - protein, 259 aa, Glycine max
MSGSNDGSGSWSSRFLKVASAAAATAAVAGGLYAILSSSTSASSEMEVPFGSARPESNTKRQQESFYEHEETEDDEESEEADNGKWKKPESGWVKLNVDGSRIHEEPASAGCGGVIRDEWGTWCVGFDQKLDPNICRQAHYTELQAILTGLKVAREDMINVEKLVVESDSEPAVNMVKSGLGYKYHRPEYKVVQDINRLLKDPKWLARLDYVPRKANRVANYLAKRVCKPSSPHDHHHFSKYPCPPDYDCEKIFLEDNN

SEQ ID NO: 632 - DNA, 3774 bp, Solanum lycopersicum
  source 1..3774: mol_type = other DNA
atggaaaaacgaaaagatattgaagaagcaaacaactcattggtgttattttctgctcttagcaaggacattgccaatgttctaattttcctagagaatgaggaaaatcaaaaagctcttgacaaagatcaagttgaaaagctaaaattgaaaatggcatttatttgtacatatgttcagctttcttattccgattttgagcagtttgaagatataatgactagaaatagacaagaggttgagaatctgcttcaatcacttttggatgatgatgtccttactagcctcaccagtaatatggatgactgtatcagcttgtatcatcgttcttataaatcagatgccatcatgatggatgagcaattggacttcctcctcttgaatctgtatcatctatccaagcatcacgctgaaaagatatttcctggagtgactcaatatgaagttcttcagaatgtatgtggcaacataagagatttccatgggttgatactgaatggttgcattaagcatgagatggttgagaatgtcttacctctgtttcaactcatggctgaaagagtaggacacttcctttgggaggatcagactgatgaagactctcggctctccgagctagatgaggatgaacacaatgatagagactctcgactcttccagctaacacatctactcttgaagattgttccaactgaactggaggttatgcacatatgttatacaaatttgaaagcttcaacttcagcagaagttggacgcttcattaagaagctcctggaaacctcaccggatattctcagagaatatatcattcaactacaagagcatatgttaactgttattccccctagcactttaggggctcgaaacattcatgtcatgatggaattcctattacttattctttctgatatgcccaaggactttattcatcatgacaaactttttgatctcttggctcatgttggaacacttaccagggaggtatcgactcttgtacgtgacttggaagagaaattaaggaataaagagggtaataaccaaacaaattgtgcaaccctagacttgctggaaaatattgaactcctcaagaaagatctcaaacatgtttatctgaaagccccaaattcatctcaatgttgcttccccatgagtgatggaccactcttcatgcatcttctacacatgcacttaaatgatttgctagattctaatgcttattcaatttctttgataaaggaagaaatcgagttggtgagtcaagaactggaattcataagatcattctttggggatgctgctgagcaaggattgtataaagatatctgggcacgtgttctagatgtggcttatgaggcaaaagatgtcatagattcaattattgttcgagataatggtctcttacatcttattttctcacttcccattaccataaagaagatcaaacttatcaaagaagagatctctgctttagatgagaacattcccaaggacagaggtctaatcgttgtgaactctcccaagaaaccagttgagagaaagtcattgacaactgataaaataattgtaggttttgaggaggagacaaacttgatacttagaaagctcaccagtggacccgcagatttagatgtcatttcgatcaccggtatgccgggttcaggtaaaactactttggcatacaaagtatacaatgataagtcagtttctagacattttgaccttcgtgcatggtgcacggtcgatcaaggatatgacgacaagaagttgttggatacaattttcagtcaagttagtggctcagattcaaatttgagtgagaatattgatgttgctgataaattgcggaaacaactgtttggaaagaggtatcttattgtcttagatgatgtgtgggatactactacattggatgagttgacaagaccttttcctgaagctaagaaaggaagtaggattattttgacaactcgagaaaaggaagtggctttgcatggaaagctgaacactgatcctcttgaccttcgattgctaagaccagatgaaagttgggaacttttagataaaaggacatttggtaatgagagttgccctgatgaactattagatgtcggtaaagaaatagccgaaaattgtaaagggcttcctttggtggctgatctgattgctggagtcattgctgggagggaaaagaaaaggagtgtgtggcttgaagttcaaagtagtttgagttcttttattttgaacagtgaagtggaagtgatgaaagttatagaattaagttatgaccatttaccacatcacctcaagccatgcttgcttcactttgcaagttggccgaaggacactcctttgacaatctatttgtttactgtttatttgggtgctgaaggatttgtggaaaagacggagatgaagggtatagaagaagtggtgaagatttatatggatgatttaatttccagtagcttggtaatttgtttcaatgagataggtgatatactgaatttccaaattcatgatcttgtgcatgacttttgtttgataaaagcaagaaaggaaaatttgtttgatcggataagatcaagtgctccatcagatttgttgcctcgtcaaattaccattgattatgatgaggaggaggagcactttgggcttaattttgtcatgttcgattcaaataagaaaaggcattctggtaaacacctctattctttgaggataaatggagaccagctggatgacagtgtttctgatgcatttcacctaagacacttgaggcttattagagtgttggacctggaaccctctttaatcatggtgaatgattctttgctgaatgaaatatgcatgttgaatcatttgaggtacttaagaattcggacacaagttaaatatctgcctttctctttctcaaacctctggaatctagaaagtctgtttgtgtctaacaaaggatcaatcttggtactattaccgagaattttggatcttgtaaagttgcgagtgctgtccgtgggtgcttgttctttctttgatatggatgcagatgaatcaatattgatagcaaaggacacaaagttagagaacttgagaatattaggggaactgttgatttcctattcgaaagatacaatgaatattttcaaaaggtttcccaatcttcaggtgcttcagtttgaactcaaggagtcatgggattattcaacagagcaacattggttcccgaaattggattgcctaactgaactagaaacactctgtgtaggttttaaaagttcaaacacaaaccactgtgggtcctctgttgtgacaaatcggccgtgggattttcacttcccttcaaatttgaaagaactgttgttgtatgactttcctctgacatccgattcactatcaacaatagcgagactgcccaaccttgaaaatttgtccctttatgatacaatcatccagggagaagaatggaacatgggggaggaagacacttttgagaatctcaaatttttgaacttgcgtctactgactctttccaagtgggaggttggagaggaatccttccccaatcttgagaaattaaaactgcaggaatgtggtaagcttgaggagattccacctagttttggagatatttattcattgaaatttatcaaaattgtaaagagtcctcaacttgaagattctgctctcaagattaagaaatacgctgaagatatgagaggagggaacgatcttcagatccttggccagaagaatatccccttatttaagtag

SEQ ID NO: 633 - DNA, 2739 bp, Glycine max
  source 1..2739: mol_type = other DNA
atggcttatgctgctgttacttcccttatgagaaccatacatcaatcaatggaacttactggatgtgatttgcaaccgttttatgaaaagctcaaatctttgagagctattctggagaaatcctgcaatataatgggcgatcatgaggggttaacaatcttggaagttgaaatcatagaggtagcatacacaacagaagatatggttgactcggaatcaagaaatgtttttttagcacggaatgtggggaaaagaagcagggctatgtgggggatttttttcgtcttggaacaagcactagaatgcattgattccaccgtgaaacagtggatggcaacatcggacagcatgaaagatctaaaaccacaaactagctcacttgtcagtttacctgaacatgatgttgagcagcccgagaatataatggttggccgtgaaaatgaatttgagatgatgctggatcaacttgctagaggaggaagggaactagaagttgtctcaatcgtagggatgggaggcatcgggaaaacaactttggctgcaaaactctatagtgatccttacattatgtctcgatttgatattcgtgcaaaagcaactgtttcacaagagtattgtgtgagaaatgtactcctaggccttctttctttgacaagtgatgaacctgattatcagctagcggaccaactgcaaaagcatctgaaaggcaggagatacttggtagtcattgatgacatatggactacagaagcttgggatgatataaaactatgtttcccagactgcgataatggaagcagaatactcctgactactcggaatgtggaagtggctgaatatgctagctcaggtaagcctcctcatcacatgcgcctcatgaattttgacgaaagttggaatttactacacaaaaagatctttgaaaaagaaggttcttattctcctgaatttgaaaatattgggaaacaaattgcattaaaatgtggagggttacctctagcaattactttgattgctggacttctctccaaaatcagtaaaacattggatgagtggcaaaatgttgcggagaatgtacgttcggtggtaagcacagatcttgaagcaaaatgcatgagagtgttggctttgagttaccatcacttgccttctcacctaaaaccgtgttttctgtattttgcaattttcgcagaggatgaacggatttatgtaaataaacttgttgagttatgggccgtagaggggtttttgaatgaagaagagggaaaaagcatagaagaggtggcagaaacatgtataaacgaacttgtagatagaagtctaatttctatccacaatgtgagttttgatggggaaacacagagatgtggaatgcatgatgtgacccgtgaactctgtttgagggaagctcgaaacatgaattttgtgaatgttatcagaggaaagagtgatcaaaattcatgtgcacaatccatgcagtgttcctttaagagtcgaagtcggatcagtatccataatgaggaagaattggtttggtgtcgtaacagcgaggctcattctatcatcacgttgtgtatattcaaatgcgtcacactggaattgtctttcaagctagtaagagtactagatcttggtttgactacatgcccaatttttcccagtggagtactttctctaattcatttgagatacctatctttgcgttttaatcctcgcttacagcagtatcgaggatcgaaagaagctgttccctcatcaataatagacattcctctatcgatatcaagcctatgctatctgcaaacttttaaactttaccatccatttcccaattgttatcctttcatattaccatcggaaattttgacaatgccacaattgaggaagctgtgtatgggctggaattacttgcggagtcatgagcctacagagaacagattggttttgaaaagtttgcaatgcctcaatgaattgaatcctcggtattgtacagggtcttttttaagactatttcccaatttaaagaagttggaagtatttggcgtcaaagaggactttcgcaatcacaaggacctgtatgattttcgctacttatatcagctcgagaaattggcatttagtacttattattcatcttctgcttgctttctaaaaaacactgcacctttaggttctactccgcaagatcctctgaggtttcagatggaaacattgcacttagagactcattccagggcaactgcacctccaactgatgttccaactttcctcttacctcctccggattgttttccacaaaaccttaagagtttaacttttagcggagatttctttttggcatggaaggatttgagcattgttggtaaattacccaaactcgaggtccttcaactatcacacaatgccttcaaaggcgaggagtgggaagtagttgaggaagggtttcctcacttgaagttcttgtttctggatagcatatacattcggtactggagagctagtagtgatcactttccataccttgaacgactttttcttagcgattgcttttatttggattcaatccctcgagattttgcagatataaccacactagctcttattgatatatttcgctgccaacaatctgttgggaattccgccaagcaaattcaacaggacattcaagacaactatggaagctctatcgaggtccatactcgttatctttatcgaaatggagcatttttggtagtgtga

SEQ ID NO: 634 - DNA, 2565 bp, Glycine max
  source 1..2565: mol_type = other DNA
atggtagtagcagtggagaaaaccaacctcacttcacaatcacaatgcttcaaccgtgtttctgacaagaagaaagaaagatgcaagacacacatgaacaacgttaacccatgttgttttttgtttctcttatgtgtgtggagccttgttgtgctcccctcatgcgtgaggccagttttgtgtgaagatgaaggttgggatggagtggttgtgacagcatcaaacctcttagcacttgaagctttcaagcaagagttggttgatccagaagggttcttgcggagctggaatgacagtggctatggagcttgttccggaggttgggttggaatcaagtgtgctaagggacaggttattgtgatccagcttccttggaagggtttgaggggtcgaatcaccgacaaaattggtcaacttcaaggcctcaggaagcttagtcttcatgataaccaaattggtggttcaatcccttcaactttgggacttcttcccaaccttagaggggttcagttattcaacaataggcttacaggttccatacctctttctttaggtttctgccctttgcttcagtctcttgacctcagcaacaacttgctcacaggagcaatcccttatagtcttgctaattccactaagctttattggcttaacttgagtttcaactccttctctggtcctttaccagctagcctaactcactcattttctctcacttttctttctcttcaaaataacaatctttctggctcccttcctaactcttggggtgggaattccaagaatggcttctttaggcttcaaaatttgatcctagatcataactttttcactggtgacgttcctgcttctttgggtagcttaagagagctcaatgagatttcccttagtcataataagtttagtggagctataccaaatgaaataggaaccctttctaggcttaagacacttgacatttctaataatgccttgaatgggaacttgcctgctaccctatctaatttatcctcacttacactgctgaatgcagagaacaacctccttgacaatcaaattcctcaaagtttaggtagattgcgtaatctttctgttctgattttgagtagaaaccaatttagtggacatattccttcaagtattgcaaacatttcctcgcttaggcagcttgatttgtcactgaataatttcagtggagaaattccagtctcctttgacagtcagcgcagtctaaatctcttcaatgtttcctacaatagcctctcaggttctgtcccccctctgcttgccaagaaatttaactcaagctcatttgtgggaaatattcaactatgtggatacagcccttcaaccccatgtctttcccaagctccatcacaaggagtcattgccccacctcctgaagtgtcaaaacatcaccatcataggaagctaagcaccaaagacataattctcatagtagcaggagttctcctcgtagtcctgattatactttgttgtgtcctgcttttctgcctgatcagaaagagatcaacatctaaggccgggaacggccaagccaccgagggtagagcggccactatgaggacagaaaaaggagtccctccagttgctggtggtgatgttgaagcaggtggggaggctggagggaaactagtccattttgatggaccaatggcttttacagctgatgatctcttgtgtgcaacagctgagatcatgggaaagagcacctatggaactgtttataaggctattttggaggatggaagtcaagttgcagtaaagagattgagggaaaagatcactaaaggtcatagagaatttgaatcagaagtcagtgttctaggaaaaattagacaccccaatgttttggctctgagagcctattacttgggacccaaaggggaaaagcttctggtttttgattacatgtctaaaggaagtcttgcttctttcctacatggtggtggaactgaaacattcattgattggccaacaagaatgaaaatagcacaagacttggcccgtggcttgttctgccttcattcccaggagaacatcatacatgggaacctcacatccagcaatgtgttgcttgatgagaatacaaatgctaaaattgcagattttggtctttctcggttgatgtcaactgctgctaattccaacgtgatagctacagctggagcattgggataccgggcacctgagctctcaaagctcaagaaagcaaacactaaaactgatatctacagtcttggtgttatcttgttagaactcctaacgaggaaatcacctggggtgtctatgaatggactagatttgcctcagtgggttgcctcagttgtcaaagaggagtggacaaatgaggtttttgatgcagacttgatgagagatgcatccacagttggcgacgagttgctaaacacgttgaagctcgctttgcactgtgttgatccttctccatcagcacgaccagaagttcatcaagttctccagcagctggaagagattagaccagagagatcagtcacagccagtcccggggacgatatcgtatag

SEQ ID NO: 635 - DNA, 2763 bp, Glycine max
  source 1..2763: mol_type = other DNA
atgtctctccccaaaaccctactttctctcttccttctcctcacgatccccctagtaaccgccgatgacgccgcggtgatgtcgaattttctcaaatccctcactccaccgccctcgggctggtctgaaacaaccccattctgccaatggaagggtatccaatgcgattcatccagccacgtgaccagcataagcctcgcttcgcattccctcaccggaacactcccctcggatctcaattccctctctcaactccgcactctctccctccaagacaattccctcaccggcaccctcccttctctctccaacctttctttcctccaaaccgtctacttaaaccgcaacaacttctcctccgtgtcccccaccgctttcgcctccctaacctccctccaaaccctcagcctcggctccaaccctgctctccaaccctggtccttccccaccgacctcacttcctcctctaacctaatcgacctcgacctcgccaccgtatccctcaccggtcccttgccggacattttcgacaaattcccttcccttcaacaccttcgcctctcttacaacaacctcaccggcaatttaccctcctctttctccgccgccaacaatctcgaaacgctctggctcaacaaccaggccgccggcttgtccggtaccctcctcgtcctctccaacatgtctgcattaaaccagtcctggctcaataagaaccagttcaccggttccataccggatttatcgcaatgcacggctttgtctgacttgcagctcagggataaccagttaactggtgtggttcccgcttcattgacaagtcttcctagtttgaagaaagtttctctggataataatgagcttcaggggcctgtgcccgtgtttgggaaaggtgtgaatgttactctcgatgggattaatagtttttgtcttgatactcctgggaattgtgatcccagggtgatggttttgctgcagattgccgaggcattcgggtatccaattcggttggcagagtcgtggaaggggaatgatccgtgtgatggttggaactatgttgtgtgtgctgccggaaagattattactgtcaatttcgagaaacagggtttgcagggtaccatctcccctgcatttgccaatttgactgacttgaggactttgtttctcaatggcaataatttgatcggttctatacctgatagtttgatcactttgcctcagcttcagactcttgatgtgtctgacaacaacctctctggattggttcctaagttcccaccaaaggtgaagttggtgactgcgggaaatgctttgcttgggaaaccccttagtcctggaggtggaccaagtggaactactccttctgggtcttcgaccggtggaagtggtggtgaatcctcaaagggtaattcttcggtgtcgccaggttggattgctggtatagttgttattgtgttgttttttattgcagtggtgttgtttgtgtcttggaagtgttttgtcaacaagctgcaggggaagttcagtagggttaaaggtcatgaaaatgggaaaggaggctttaaacttgatgctgtccatgtttctaatggatatggtggtgttccagttgagttgcaaagccagagcagtggtgatcgcagtgaccttcatgctttagatggtccaacattttctatccaagttcttcgacaagtgacgaataatttcagcgaggagaacattttaggcaggggagggtttggagtagtttataagggggtgttgcatgatggaacaaaaattgctgttaagaggatggaatctgttgcaatggggaacaaaggtcagaaagagttcgaagcagagattgcacttcttagtaaagttaggcatagacatttggttgctcttctagggtattgcatcaatggcaatgaaaggcttttggtgtatgagtatatgcctcaaggtacattaacacagcacctgtttgagtggcaggagcatgggtatgctcctttgacttggaagcaaagggtagtaatagctttggatgtagcgcggggggtggaatacttgcacagtttagctcagcaaagcttcattcatagagacttaaaaccctcaaacatactactaggcgatgacatgagagcaaaggttgctgattttgggttggttaaaaatgcaccagatgggaagtattctgttgagacacggttggctggaacatttggatatcttgcacctgagtatgcagctactggaagagtgacaaccaaagtggatgtttatgcatttggagtagttctgatggaacttatcaccggtagaaaggcattggatgatactgtgccagatgaaaggtctcacttggtgacatggttccgtagggtactaattaacaaggaaaacattccaaaggcaattgatcaaattctcaatccagatgaggaaaccatgggaagcatatatacagtggccgagctggcaggccattgcactgctcgcgaaccataccaaaggccggatatgggtcatgcagtgaacgtcttggttcctcttgtggagcaatggaaacctactagccatgatgaagaagaggaagacggctctggcggtgaccttcatatgagccttcctcaagctctacgaaggtggcaagccaacgaaggcacttcctcaatatttaatgacatttccatctcacaaacccaatcaagcatctcctctaaacctgcagggtttgcagactcctttgattcaatggattgccgttaa

SEQ ID NO: 636 - DNA, 405 bp, Zea mays
  source 1..405: mol_type = other DNA
atgcgcaaacatcgaatcgtctcactcgtggctgccctgctcatactgcttgccctcgccgtatcgtccaaccgcaacgcacaggaggattccatggccgacaacaccgggacgttggtgggcggcatccaggacgtgccggagaacgagaacgaccttcacctccaggagctcgcccgcttcgccgtcgatgagcacaacaagaaggccaatgctcttctggggttcgagaagcttgtgaaggccaagacacaagtggttgctggcacgatgtactatctcactattgaagtgaaggatggcgaagtcaagaagctctacgaagctaaggtctgggagaagccatgggagaagttcaaggagctgcaggaattcaagcctgttgaagagggtgctagcgcctaa

SEQ ID NO: 637 - DNA, 618 bp, Colocasia esculenta
  source 1..618: mol_type = other DNA
atggccttgatggggggcatcgtggatgtggagggagcgcagaacagcgccgaagtagaggagctcgcccgcttcgccgtcgacgaacacaataagaaggagaatgcgcttctgcagttctcccggcttgtgaaggcgaagcaacaggtggtttcgggcattatgcatcacctcactgtggaggttatcgaaggtggcaagaagaaagtgtatgaagccaaggtctgggtccaggcttggcttaactccaagaagcttcatgagttcagccccattggcgattcatcctcggttacgccagcagatctcggtgtaaaacgggatgcgcacgaagcggaatggctagagataccaacacatgatcctgtcgtccaagacgcagcaaaccatgcggtgaagagcatccagcaaagatccaatactttgttcccttatgaactgttggagatccttcatgcaaaggctaaggtgcttgaggacctcgccaaaatccatttgctactcaaacttaagaggggaagcagggaggagaagttcaaggtggaagtgcacaagaacattgaggggactttccatctgaatcagatggagcaagatcattcagactctggaaactag

SEQ ID NO: 638 - DNA, 1434 bp, synthetic construct
  source 1..1434: mol_type = other DNA
atggccatcgatagcaagactactttgcctaggcattcacttatccatacaatcaagctgaactctaacaagaagtatggtcctggtgacatgactaacggaaatcagttcatcatctcaaagcaggagtgggctactatcggagcctacatccagactggacttggattgccagtgaacgagcagcagttgaggacacatgttaacttgtctcaggatatctcaatccctagtgatttctctcagttgtatgacgtttactgttctgataagactagtgcagagtggtggaacaagaacttgtatcctttgatcatcaagtctgctaacgacatcgcttcatacggtttcaaggtggctggtgatccttctatcaagaaggatggatatttcaagaagttgcaggacgagcttgataacatcgttgataacaactctgatgacgacgcaatcgctaaggctatcaaggatttcaaggctagatgtggtatcttgatcaaggaagctaagcagtatgaggaagctgccaagaacatcgtgacatctctcgatcagttcttacatggtgatcagaagaagttagaaggtgttatcaacatccagaagaggttgaaggaagtgcagacagctcttaaccaggctcatggagagtctagtccagctcataaggagctcttggagaaagtgaagaacttgaagacaacattagagaggactatcaaggctgagcaggaccttgagaagaaagtggagtatagcttcttgttaggaccattgttgggattcgtggtttacgagatccttgagaacactgctgttcagcatatcaagaaccagatcgatgagatcaagaagcagttggattctgctcagcatgatttggacagggacgtgaagattatcggaatgttgaacagtatcaacacagatatcgacaacctttactctcaaggacaggaagcaatcaaggttttccagaagttgcaaggaatctgggctactatcggtgctcagatcgagaaccttaggacaacatcattgcaagaggttcaggactctgatgacgctgatgagatccagatcgaactcgaggacgcttctgacgcttggttggttgtggctcaggaggctagggatttcacacttaacgcttactcaactaactctaggcagaaccttccaatcaacgttatctcagattcatgtaactgttcaacaacaaacatgacatcaaaccaatacagcaatccaacaacaaacatgacatcaaaccagtacatgatctcacatgagtacacaagcttgccaaacaacttcatgttgtcaaggaactctaacttggaatacaagtgtcctgagaacaacttcatgatctattggtacaacaactctgactggtacaacaactctgattggtacaacaaccctccataa

SEQ ID NO: 639 - protein, 587 aa, Bacillus thuringiensis
KDQQLFNAIMDAVNKMVDNKFLSYNLSTLNKTIEGLQGNLGLFQNAIQVAICQGSTPERVNFDQNCTPCNPNQPCKDDLDRVASRFDTANSQFTQHLPEFKNPWSDENSTQEFKRTSVELTLPMYTTVATLHLLLYEGYIEFMTKWNFHNEQYLNNLKVELQQLIHSYSETVRTSFLQFLPTLNNRSKSSVNAYNRYVRNMTVNCLDIAATWPTFDTHNYHQGGKLDLTRIILSDTAGPIEEYTTGDKTSGPEHSNITPNNILDTPSPTYQHSFVSVDSIVYSRKELQQLDIATYSTNNSNNCHPYGLRLSYTDGSRYDYGDNQPDFTTSNNNYCHNSYTAPITLVNARHLYNAKGSLQNVESLVVSTVNGGSGSCICDAWINYLRPPQTSKNESRPDQKINVLYPITETVNKGTGGNLGVISAYVPMELVPENVIGDVNADTKLPLTQLKGFPFEKYGSEYNNRGISLVREWINGNNAVKLSNSQSVGIQITNQTKQKYEIRCRYASKGDNNVYFNVDLSENPFRNSISFGSTESSVVGVQGENGKYILKSITTVEIPAGSFYVHITNQGSSDLFLDRIEFVPKIQ

SEQ ID NO: 640 - protein, 1257 aa, Solanum lycopersicum
MEKRKDIEEANNSLVLFSALSKDIANVLIFLENEENQKALDKDQVEKLKLKMAFICTYVQLSYSDFEQFEDIMTRNRQEVENLLQSLLDDDVLTSLTSNMDDCISLYHRSYKSDAIMMDEQLDFLLLNLYHLSKHHAEKIFPGVTQYEVLQNVCGNIRDFHGLILNGCIKHEMVENVLPLFQLMAERVGHFLWEDQTDEDSRLSELDEDEHNDRDSRLFQLTHLLLKIVPTELEVMHICYTNLKASTSAEVGRFIKKLLETSPDILREYIIQLQEHMLTVIPPSTLGARNIHVMMEFLLLILSDMPKDFIHHDKLFDLLAHVGTLTREVSTLVRDLEEKLRNKEGNNQTNCATLDLLENIELLKKDLKHVYLKAPNSSQCCFPMSDGPLFMHLLHMHLNDLLDSNAYSISLIKEEIELVSQELEFIRSFFGDAAEQGLYKDIWARVLDVAYEAKDVIDSIIVRDNGLLHLIFSLPITIKKIKLIKEEISALDENIPKDRGLIVVNSPKKPVERKSLTTDKIIVGFEEETNLILRKLTSGPADLDVISITGMPGSGKTTLAYKVYNDKSVSRHFDLRAWCTVDQGYDDKKLLDTIFSQVSGSDSNLSENIDVADKLRKQLFGKRYLIVLDDVWDTTTLDELTRPFPEAKKGSRIILTTREKEVALHGKLNTDPLDLRLLRPDESWELLDKRTFGNESCPDELLDVGKEIAENCKGLPLVADLIAGVIAGREKKRSVWLEVQSSLSSFILNSEVEVMKVIELSYDHLPHHLKPCLLHFASWPKDTPLTIYLFTVYLGAEGFVEKTEMKGIEEVVKIYMDDLISSSLVICFNEIGDILNFQIHDLVHDFCLIKARKENLFDRIRSSAPSDLLPRQITIDYDEEEEHFGLNFVMFDSNKKRHSGKHLYSLRINGDQLDDSVSDAFHLRHLRLIRVLDLEPSLIMVNDSLLNEICMLNHLRYLRIRTQVKYLPFSFSNLWNLESLFVSNKGSILVLLPRILDLVKLRVLSVGACSFFDMDADESILIAKDTKLENLRILGELLISYSKDTMNIFKRFPNLQVLQFELKESWDYSTEQHWFPKLDCLTELETLCVGFKSSNTNHCGSSVVTNRPWDFHFPSNLKELLLYDFPLTSDSLSTIARLPNLENLSLYDTIIQGEEWNMGEEDTFENLKFLNLRLLTLSKWEVGEESFPNLEKLKLQECGKLEEIPPSFGDIYSLKFIKIVKSPQLEDSALKIKKYAEDMRGGNDLQILGQKNIPLFK

SEQ ID NO: 641 - protein, 912 aa, Glycine max
MAYAAVTSLMRTIHQSMELTGCDLQPFYEKLKSLRAILEKSCNIMGDHEGLTILEVEIIEVAYTTEDMVDSESRNVFLARNVGKRSRAMWGIFFVLEQALECIDSTVKQWMATSDSMKDLKPQTSSLVSLPEHDVEQPENIMVGRENEFEMMLDQLARGGRELEVVSIVGMGGIGKTTLAAKLYSDPYIMSRFDIRAKATVSQEYCVRNVLLGLLSLTSDEPDYQLADQLQKHLKGRRYLVVIDDIWTTEAWDDIKLCFPDCDNGSRILLTTRNVEVAEYASSGKPPHHMRLMNFDESWNLLHKKIFEKEGSYSPEFENIGKQIALKCGGLPLAITLIAGLLSKISKTLDEWQNVAENVRSVVSTDLEAKCMRVLALSYHHLPSHLKPCFLYFAIFAEDERIYVNKLVELWAVEGFLNEEEGKSIEEVAETCINELVDRSLISIHNVSFDGETQRCGMHDVTRELCLREARNMNFVNVIRGKSDQNSCAQSMQCSFKSRSRISIHNEEELVWCRNSEAHSIITLCIFKCVTLELSFKLVRVLDLGLTTCPIFPSGVLSLIHLRYLSLRFNPRLQQYRGSKEAVPSSIIDIPLSISSLCYLQTFKLYHPFPNCYPFILPSEILTMPQLRKLCMGWNYLRSHEPTENRLVLKSLQCLNELNPRYCTGSFLRLFPNLKKLEVFGVKEDFRNHKDLYDFRYLYQLEKLAFSTYYSSSACFLKNTAPLGSTPQDPLRFQMETLHLETHSRATAPPTDVPTFLLPPPDCFPQNLKSLTFSGDFFLAWKDLSIVGKLPKLEVLQLSHNAFKGEEWEVVEEGFPHLKFLFLDSIYIRYWRASSDHFPYLERLFLSDCFYLDSIPRDFADITTLALIDIFRCQQSVGNSAKQIQQDIQDNYGSSIEVHTRYLYRNGAFLVV

SEQ ID NO: 642 - protein, 854 aa, Glycine max
MVVAVEKTNLTSQSQCFNRVSDKKKERCKTHMNNVNPCCFLFLLCVWSLVVLPSCVRPVLCEDEGWDGVVVTASNLLALEAFKQELVDPEGFLRSWNDSGYGACSGGWVGIKCAKGQVIVIQLPWKGLRGRITDKIGQLQGLRKLSLHDNQIGGSIPSTLGLLPNLRGVQLFNNRLTGSIPLSLGFCPLLQSLDLSNNLLTGAIPYSLANSTKLYWLNLSFNSFSGPLPASLTHSFSLTFLSLQNNNLSGSLPNSWGGNSKNGFFRLQNLILDHNFFTGDVPASLGSLRELNEISLSHNKFSGAIPNEIGTLSRLKTLDISNNALNGNLPATLSNLSSLTLLNAENNLLDNQIPQSLGRLRNLSVLILSRNQFSGHIPSSIANISSLRQLDLSLNNFSGEIPVSFDSQRSLNLFNVSYNSLSGSVPPLLAKKFNSSSFVGNIQLCGYSPSTPCLSQAPSQGVIAPPPEVSKHHHHRKLSTKDIILIVAGVLLVVLIILCCVLLFCLIRKRSTSKAGNGQATEGRAATMRTEKGVPPVAGGDVEAGGEAGGKLVHFDGPMAFTADDLLCATAEIMGKSTYGTVYKAILEDGSQVAVKRLREKITKGHREFESEVSVLGKIRHPNVLALRAYYLGPKGEKLLVFDYMSKGSLASFLHGGGTETFIDWPTRMKIAQDLARGLFCLHSQENIIHGNLTSSNVLLDENTNAKIADFGLSRLMSTAANSNVIATAGALGYRAPELSKLKKANTKTDIYSLGVILLELLTRKSPGVSMNGLDLPQWVASVVKEEWTNEVFDADLMRDASTVGDELLNTLKLALHCVDPSPSARPEVHQVLQQLEEIRPERSVTASPGDDIV

SEQ ID NO: 643 - protein, 920 aa, Glycine max
MSLPKTLLSLFLLLTIPLVTADDAAVMSNFLKSLTPPPSGWSETTPFCQWKGIQCDSSSHVTSISLASHSLTGTLPSDLNSLSQLRTLSLQDNSLTGTLPSLSNLSFLQTVYLNRNNFSSVSPTAFASLTSLQTLSLGSNPALQPWSFPTDLTSSSNLIDLDLATVSLTGPLPDIFDKFPSLQHLRLSYNNLTGNLPSSFSAANNLETLWLNNQAAGLSGTLLVLSNMSALNQSWLNKNQFTGSIPDLSQCTALSDLQLRDNQLTGVVPASLTSLPSLKKVSLDNNELQGPVPVFGKGVNVTLDGINSFCLDTPGNCDPRVMVLLQIAEAFGYPIRLAESWKGNDPCDGWNYVVCAAGKIITVNFEKQGLQGTISPAFANLTDLRTLFLNGNNLIGSIPDSLITLPQLQTLDVSDNNLSGLVPKFPPKVKLVTAGNALLGKPLSPGGGPSGTTPSGSSTGGSGGESSKGNSSVSPGWIAGIVVIVLFFIAVVLFVSWKCFVNKLQGKFSRVKGHENGKGGFKLDAVHVSNGYGGVPVELQSQSSGDRSDLHALDGPTFSIQVLRQVTNNFSEENILGRGGFGVVYKGVLHDGTKIAVKRMESVAMGNKGQKEFEAEIALLSKVRHRHLVALLGYCINGNERLLVYEYMPQGTLTQHLFEWQEHGYAPLTWKQRVVIALDVARGVEYLHSLAQQSFIHRDLKPSNILLGDDMRAKVADFGLVKNAPDGKYSVETRLAGTFGYLAPEYAATGRVTTKVDVYAFGVVLMELITGRKALDDTVPDERSHLVTWFRRVLINKENIPKAIDQILNPDEETMGSIYTVAELAGHCTAREPYQRPDMGHAVNVLVPLVEQWKPTSHDEEEEDGSGGDLHMSLPQALRRWQANEGTSSIFNDISISQTQSSISSKPAGFADSFDSMDCR

SEQ ID NO: 644 - protein, 134 aa, Zea mays
MRKHRIVSLVAALLILLALAVSSNRNAQEDSMADNTGTLVGGIQDVPENENDLHLQELARFAVDEHNKKANALLGFEKLVKAKTQVVAGTMYYLTIEVKDGEVKKLYEAKVWEKPWEKFKELQEFKPVEEGASA

SEQ ID NO: 645 - protein, 205 aa, Colocasia esculenta
MALMGGIVDVEGAQNSAEVEELARFAVDEHNKKENALLQFSRLVKAKQQVVSGIMHHLTVEVIEGGKKKVYEAKVWVQAWLNSKKLHEFSPIGDSSSVTPADLGVKRDAHEAEWLEIPTHDPVVQDAANHAVKSIQQRSNTLFPYELLEILHAKAKVLEDLAKIHLLLKLKRGSREEKFKVEVHKNIEGTFHLNQMEQDHSDSGN

SEQ ID NO: 646 - protein, 475 aa, Bacillus thuringiensis
MIIDSKTTLPRHSLIHTIKLNSNKKYGPGDMTNGNQFIISKQEWATIGAYIQTGLGLPVNEQQLRTHVNLSQDISIPSDFSQLYDVYCSDKTSAEWWNKNLYPLIIKSANDIASYGFKVAGDPSIKKDGYFKKLQDELDNIVDNNSDDDAIAKAIKDFKARCGILIKEAKQYEEAAKNIVTSLDQFLHGDQKKLEGVINIQKRLKEVQTALNQAHGESSPAHKELLEKVKNLKTTLERTIKAEQDLEKKVEYSFLLGPLLGFVVYEILENTAVQHIKNQIDEIKKQLDSAQHDLDRDVKIIGMLNSINTDIDNLYSQGQEAIKVFQKLQGIWATIGAQIENLRTTSLQEVQDSDDADEIQIELEDASDAWLVVAQEARDFTLNAYSTNSRQNLPINVISDSCNCSTTNMTSNQYSNPTTNMTSNQYMISHEYTSLPNNFMLSRNSNLEYKCPESNFMIYWYNNSDWYNNSDWYNN

SEQ ID NO: 647 - DNA, 1000 bp, Pseudomonas syringae
  source 1..1000: mol_type = other DNA
atgaacaagcgctacggcaacaacttgccgggatcctgttgcgcgctgagcaaccggatcgactggacgtcaccttcgcgcagcacgccatctggcaaaaaggccgccgttaatcgtttccaatatttctgcaggagtctgcccgtgaccaccttcaccgtgcccctgattctgtcggatgcaagccccacggcactcgccgctaccgcgcaacgtctgcgcgccgagcacgagacgcgctccttcgccgctgatgactgacatcaccgtgcccttccagctcggaatgcacttcgtcttcccagctttcctgatacggctgacgatacattttgcggaagtgattgcggatcaggttcagcgcgatgccacacagccaggtctgcggtttgctggcatgttgaaacttgtgctcgttacgcagggcttcaagaaacacgcactggagaatgtcatccacatcatcagggttcatcacccgcttttggataaacgccctgcagggcgtttatccaaaagcgggtgatgaaccctgatgatgtggatgacattctccagtgcgtgtttcttgaagccctgcgtaacgagcacaagtttcaacatgccagcaaaccgcagacctggctgtgtggcatcgcgctgaacctgatccgcaatcacttccgcaaaatgtatcgtcagccgtatcaggaaagctgggaagacgaagtgcattccgagctggaagggcacggtgatgtcagtcatcagcggcgaaggagcgcgtctcgtgctcggcgcgcagacgttgcgcggtagcggcgagtgccgtggggcttgcatccgacagaatcaggggcacggtgaaggtggtcacgggcagactcctgcagaaatattggaaacgattaacggcggcctttttgccagatggcgtgctgcgcgaaggtgacgtccagtcgatccggttgctcagcgcgcaacaggatcccggcaagttgttgccgtagcgcttgttcat

SEQ ID NO: 648 - DNA, 1313 bp, Arabidopsis thaliana
  source 1..1313: mol_type = other DNA
atggcctctctattctcttcagttctcttgtctctttgtttactctcttcactttttctctcaaatgcaaacgctaagccaaaactaggcttcaccgcggatctaatccaccgtgattctcctaaatcgccgttctataacccgatggaaacctcttcccagcgtctacgaaacgcgatccaccgatccgttaaccgtgttttccatttcactgaaaaggataacacaccacaaccacagattgacctcacctcaaatagcggtgaatatctcatgaacgtatccattggaacacctcctttcccgatcatggccatcgccgacaccggaagtgatctcctctggacgcagtgcgcaccatgcgatgattgttacactcaagttgatcctctctttgaccctaaaacgtcttccacatacaaagacgtttcttgctcctcaagtcaatgtactgccctagaaaatcaagcctcttgttccacaaatgacaacacttgttcttactcattgtcttacggggataactcatacacaaagggtaacatcgccgtggataccttaacgctcggctccagcgatacccgccctatgcagcttaagaatattattatcggttgtggtcacaacaacgctggaacgtttaacaagaaaggctctggaatcgtcggactaggtggtggtccggtttcgcttatcaagcaacttggcgactccatcgacggtaaattctcatactgcttggttcctctaacttccaaaaaggatcaaacgagtaaaatcaacttcggaaccaatgccatcgtgtcgggatcaggagttgtctcaactcctctgatcgcaaaggcgtctcaagagaccttctattacctaaccctaaaatccattagcgtgggaagcaagcaaatccaatactcaggctcagattctgaaagcagcgagggaaacatcatcatcgattcaggcacaactttaacgttattaccgactgaattttactccgagctcgaggatgcggttgcatcctctatcgatgctgagaagaagcaagatccacaaagcggtttgagtctatgttacagtgcaaccggagatctaaaagttccagtcattactatgcattttgatggagccgatgtgaagcttgactcctccaatgcctttgtacaagtctcggaggatttggtttgctttgccttccgcggaagcccgagtttctccatatacggtaatgtggcgcagatgaactttcttgttggatacgacactgtttccaaaacggtgtcatttagccaacagattgtgcaaagatgtag

SEQ ID NO: 649 - DNA, 1771 bp, Poncirus trifoliata
  source 1..1771: mol_type = other DNA
ttgagaggaatatatattgtagctgttggcgactaatagatgattgttaattattaatgaatcagatattgtgttttgtgttagatttagtgattgatgatcttttcagtgacacagcgacacaaataacatcaaatatgttaatttatagttttataccatatcgattcaaaaccaaatacagtaaaacgaactaatcgttcgtaggatgatacaatcttgcgaaatacaaaatttaattactgcttggtgcagtcagtcggtctaaatgacactgtttgttgttctatgtcatagccgactaaaaagttagtctgcattatattaccataaagttgcagactattggtggtacctttaaaaacagaacatacaatatccttcgaaaccttcacaaaaaagttggaacgactcaatttcacatctgcacctctgaaatgtattgtaacttcaggaacttgagatagtgaattaaaactgtagcaaagttcaaatgatcctttggggtctgcaacaggttgtgcctcaatcatactggacattactgacaacaattttgagttataaccttgtggcaataaggtaaatgttgtaccagaatcgattacaatgtctcttcctggagtcgatccagacataacttctagtctttggtttcctacactgattgcatcaattgtgagaacataagaggttttggctttagtcaagggagtagaaaccactcctgggcctgaaacaattccattggttccaaaattgattttggttgaggttgctggaaccaaacaataggagaatttaccagcaattgtagttcgcatttgagaaataagtgaaatatcgccgcctccaaggccaacaattccggttgtttttgaattaaacaagccaccattgtttgttccgcaaccaaaggttattccaggcagagccacggcctgtcctgttgttgaacccaaagtaacagtttcggtagcaagattgccatttgagaaggatccatctccataagagaccgagtattgacaatttaccccagagcaagatttttggctaagagatgcacattggcttgaggagcatggaagagatttgtaagtagatgactttttaggatcaaaaagtggagagtcctgcatgtaacattttgatggtgggcaaggctcgcactgcgtccatatgaggtcacttcctgtatcagcaacagctagtatttcagtagcgggagtaccaattgatatacgtatgagatattctcccctattgggtattatatcagcttgggaagcggctgatgaagatattgatgagttctgattaaagtgattaagacgattgagagaacgagtcaaagcatttctcaatcgttggtagggagtttcactggagttgtaaaagggagacttgggagagtcacggtggattagctcaacactgaaacctccagtttgagcttctattggagagacaacataaaaacaaagaaagaagagaatgaatgcacaactcaagaaggttgccataatcaaagctgtgattgaggtaataagaaagtggcaacgagtctatgcttatatagaggaggacacagagagataagttgcaaaatttaattaattttgaatagaagaccaaaaaaaaaaaaaaaaggaaagaaaatgagcttccaagaaaatgaaactttcttgtgtagtaagcttttgttatagtgacaattatcttatgggagggcctaagttacgttyaacgtaayttaygccctctcaca

SEQ ID NO: 650 - DNA, 1426 bp, Poncirus trifoliata
  source 1..1426: mol_type = other DNA
atggcaaccttcttgagttgtgcattcattctcttctttttttttttttatgttgtctctccaatagaagctcaaactggaggtttcagtgttgagctaatccaccgtgactctcccaagtctcccttttacaactccagtgaaactccctaccaacgattgagaaatgcttttactcgttctaccaatcgtcccaatcactttaatcagaactcatcaatatcttcatcaaaagcttcccaagctgatataatacccaatatgggagactatctcatacgtatatcaattggtactcccgcgactgaaatactagcagttgctgatacaggaagtgacctcatatggacgcagtgcgagccttgcccaccatcacaatgttacatgcaggactctccacttttttatcctaaaaagtcatctacttacaaatctcttccatgctcctcaagccaatgtgcatctcttagccaaaaatcttgctctggggtaaattgtcaatactcggtctcttatggagatggatccttctcaaatggcaatcttgctaccgaaactgttactttgggttcaacaacaggacaggccgtggctctgcctggaataacctttggttgcggaacaaacaatggtggcttgtttaattcaaaaacaaccggaattgttggccttggaggcggcggtatttcacttatttctcaaatgcgaactacaattgctggtaaattctcctattgtttggttcaggcaagctcaaccaaaatcaattttggaaccaatggaattgtttcaggtccaggagtggtttctactcccttgattgttaaatccaaaaccttttatgctctcacaattgatgcaatcagtgtaggaaaccaaagactagaagttatgtctggatcgactccaggaggagacattgtaatcgattctggtacaacacttaccttattgccacaacgttataactcaaaattgttgtcagtaatgtccagtatgattgaggcacaacctgttgcagaccctaaaggatcacttgaactttgctacagttttaattcactatctcaagttcctgaagttacaatacatttcagaggtgcagatgtgaaattgagtccttccaacttttttgtgaaggtttcgaaggatattgtatgttctgtttttaaaggtaccaatmgtctgccactttatggtaatataatgcagactaactttttggtcggctatgacatagaacaaggaacagtgtcatttaaaccgactgattgcaccaagcaataattaattgggaagcttaatcgatattctccactctactagagtttgatcgagtgattttcaaaccactttctttagcagatcaaccgatttcaaattctaatgcgattggagctgaataaaatctatttaaataaatgta

SEQ ID NO: 651 - DNA, 192 bp, Hyalophora cecropia
  source 1..192: mol_type = other DNA
atgaatttcgcaaagatcctatccttcgtcttcgctctggtgctggctttgagcatgaccagcgctgctcccgagcccaggtggaagatcttcaagaaaattgaaaaaatgggcaggaacatccgtgatggcatcgtcaaagcgggcccggcgatcgaggtcctcggttcggctaaagctataggaaaatga

SEQ ID NO: 652 - DNA, 33 bp, synthetic construct
  source 1..33: mol_type = other DNA
aaaaaactgtttaaaaaaattctgaaatatctg

SEQ ID NO: 653 - DNA, 45 bp, synthetic construct
  source 1..45: mol_type = other DNA
aaatggaaactgtttaaaaaaattggcgcggtgctgaaagtgctg

SEQ ID NO: 654 - DNA, 219 bp, Medicago truncatula
  source 1..219: mol_type = other DNA
atggagaagaaatcactagcaggcttatgcttcctcttcctcgttctctttgttgcacaagaaattgtggtgactgaagctaagacttgtgagaatttggctgataaatacaggggaccatgctttagtggttgtgatactcactgcactaccaaagagaatgcagttagcggcaggtgcagggatgactttcgttgttggtgtactaaaagatgttaa

SEQ ID NO: 655 - DNA, 495 bp, Raphanus sativus
  source 1..495: mol_type = other DNA
atggagaagaaatcactagctggcttgtgcttcctcttcctcgttctctttgttgcacaagaaattgtggtgactgaagccaaaacttgtgagaatttggctgataaatacaggggaccatgcttcagtggctgtgacactcattgcacaaccaaagaacacgcagttagcggcaggtgcagggatgactttcgctgctggtgtactaaaagatgtagcaacgcagcagacgaggtggcgacgccacaagacatggctaagtttgcttctatcattgtccttctcttcgttgctcttgtcgtttttgctgctttcgaagaaccaacaatggtggaagcacagaagttgtgtcagaggccaagtgggacatggtcaggagtctgtggaaataataacgcatgcaagaatcagtgcattcgacttgagaaagcacgacatgggtcttgcaactatgtcttcccagctcacaagtgtatctgttatttcccttgttaa

SEQ ID NO: 656 - DNA, 243 bp, Arabidopsis thaliana
  source 1..243: mol_type = other DNA
atggctaagtctgctaccatcgttactcttttcttcgctgctcttgttttctttgctgctcttgaagcaccgatggtggtggaagcacagaagttgtgcgagaggccaagtgggacatggtccggagtttgcggaaacagtaacgcgtgcaagaatcagtgcattaaccttgagaaagcacgacatggatcttgcaactatgtcttcccagctcacaaatgtatctgctacttcccatgttaa

SEQ ID NO: 657 - DNA, 24 bp, Brassica oleracea
  source 1..24: mol_type = other DNA
ttttggcagaaaatgagctttgcg

SEQ ID NO: 658 - DNA, 21 bp, Photorhabdus sp.
  source 1..21: mol_type = other DNA
tggaactggagcaaaagcttt

SEQ ID NO: 659 - DNA, 30 bp, Urechis unicinctus
  source 1..30: mol_type = other DNA
gcggcgggcatgggcttttttggcgcgcgc

SEQ ID NO: 660 - protein, 437 aa, Arabidopsis thaliana
MASLFSSVLLSLCLLSSLFLSNANAKPKLGFTADLIHRDSPKSPFYNPMETSSQRLRNAIHRSVNRVFHFTEKDNTPQPQIDLTSNSGEYLMNVSIGTPPFPIMAIADTGSDLLWTQCAPCDDCYTQVDPLFDPKTSSTYKDVSCSSSQCTALENQASCSTNDNTCSYSLSYGDNSYTKGNIAVDTLTLGSSDTRPMQLKNIIIGCGHNNAGTFNKKGSGIVGLGGGPVSLIKQLGDSIDGKFSYCLVPLTSKKDQTSKINFGTNAIVSGSGVVSTPLIAKASQETFYYLTLKSISVGSKQIQYSGSDSESSEGNIIIDSGTTLTLLPTEFYSELEDAVASSIDAEKKQDPQSGLSLCYSATGDLKVPVITMHFDGADVKLDSSNAFVQVSEDLVCFAFRGSPSFSIYGNVAQMNFLVGYDTVSKTVSFKPTDCAKM

SEQ ID NO: 661 - protein, 63 aa, Hyalophora cecropia
MNFAKILSFVFALVLALSMTSAAPEPRWKIFKKIEKMGRNIRDGIVKAGPAIEVLGSAKAIGK

SEQ ID NO: 662 - protein, 11 aa, synthetic construct
KKLFKKILKYL

SEQ ID NO: 663 - protein, 15 aa, synthetic construct
KWKLFKKIGAVLKVL

SEQ ID NO: 664 - protein, 72 aa, Medicago truncatula
MEKKSLAGLCFLFLVLFVAQEIVVTEAKTCENLADKYRGPCFSGCDTHCTTKENAVSGRCRDDFRCWCTKRC

SEQ ID NO: 665 - protein, 164 aa, Raphanus sativus
MEKKSLAGLCFLFLVLFVAQEIVVTEAKTCENLADKYRGPCFSGCDTHCTTKEHAVSGRCRDDFRCWCTKRCSNAADEVATPQDMAKFASIIVLLFVALVVFAAFEEPTMVEAQKLCQRPSGTWSGVCGNNNACKNQCIRLEKARHGSCNYVFPAHKCICYFPC

SEQ ID NO: 666 - protein, 80 aa, Arabidopsis thaliana
MAKSATIVTLFFAALVFFAALEAPMVVEAQKLCERPSGTWSGVCGNSNACKNQCINLEKARHGSCNYVFPAHKCICYFPC

SEQ ID NO: 667 - protein, 8 aa, Brassica oleracea
FWQKMSFA

SEQ ID NO: 668 - protein, 7 aa, Photorhabdus sp.
WNWSKSF

SEQ ID NO: 669 - protein, 10 aa, Urechis unicinctus
AAGMGFFGAR

SEQ ID NO: 670 - DNA, 6393 bp, Tomato brown rugose fruit virus
  source 1..6393: mol_type = other DNA
gtatttttgttttacaacatataccaacaacaacaaacaacaaacaacaacattacaattactatttacaactacaatggcatacacacagacagctaccacatccgctttgctcgacactgtccgaggtaacaataccttggtcaacgatcttgcgaagcggcgtctttatgacacagcggtcgacgagttcaacgctcgtgatcgcaggcccaaagtaaatttttccaaagtaataagtgaggaacagacgcttattgctactagggcatatccagaattccagataaccttctataatacgcagaacgccgtgcattcgcttgccggtggactacgatccttagaactggaatatctaatgatgcagatcccgtacggatcactcacatatgatataggtgggaattttgcatctcatctgttcaaaggacgggcatatgttcactgctgtatgcccaatcttgatgtccgcgacataatgcggcacgaaggccagaaagacagtatagaattatacctttccaggcttgagcggggcaacaaagttgtcccaaatttccaaaaggaagcttttgacagatacgctgaaacgccagacgaagttgtctgtcacagtaccttccaaacgtgtacgcaccagcaggtggaaaacacaggcagggtgtatgctattgcattgcacagtatatacgatatacctgctgatgaattcggagcggcacttttaaggaaaaatgtccatgtttgttacgccgccttccacttttccgagaatttacttctcgaagattcacacgtcaaccttgacgaaatcaacgcgtgtttttcgcgtgatggagacaagctgactttttctttcgcatctgagagcactttaaattattgtcatagttattctaatattttaaaatacgtgtgcaaaacttacttcccggcatctaatagagaggtctacatgaaggagtttttggtcaccagggttaacacctggttttgtaagttttctaggatagatacttttttattatacaagggggtagcccacaaaggtgtaaatagtgagcaattttacagcgcaatggaagatgcatggcactacaaaaagactcttgcaatgtgtaacagcgagaggattcttcttgaagattcctcatcggtcaattactggttcccaaaaatgagagatatggtcatagttcctctattcgacatatctctcgacaccagtaaaaggacccgcaaagaagtcttagtgtcaaaggattttgtattcacagttttaaatcacattcgcacttatcaagccaaggcacttacatactccaatgttttatcctttgtcgaatcaattcgttcaagggtaattatcaacggagtgactgccaggtctgagtgggatgttgacaaatctcttttgcaatccttgtccatgacatttttcttgcatactaagcttgccgttttaaaagacgaattgttaatcagcaagtttagtttggggccaaaatcagtaagccagcatgtatgggatgagatttccctggcttttggaaacgcatttccatcgatcaaggagagactgctaaatcggaaactaattaaagtgtcgggagacgcattagaaatcagggtgcctgatttatatgtgacttttcacgatagattagtgactgagtacaaaacatcggtggatatgccagtgcttgatatcagaaagagaatggaggagactgaggttatgtacaatgcattgtctgagctatctgtgctcaaggagtcggacaagttcgacgttgatgttttttcccggatgtgccagactttggaggtagacccaatgactgcagcaaaggttattgtggcagtgatgagcaacgagagcggactgactcttacattcgaacagccaactgaagcaaatgtcgcattggcacttaaagattcagaaaaagcctctgagggtgcactagtggttacttctagagatgttgaagaaccatccatgaagggttcaatggcaagaggagagttacaattggccggtctgtctggagaccaaccagagtcttcctatactcggaacgaggaaatagagtcattagagcaattccacatggcaacggctagttcgttaattcggaaacagatgagttcgattgtgtacacgggccccattaaagttcagcaaatgaaaaactttattgatagcctggtagcatcactctctgctgcggtgtcgaacctagtcaagatcctaaaggatacagctgctatagatctcgaaacccgtcagaagtttggagtcttagatgttgcgaccaaaagatggttaattaaacctttagccaagaatcacgcatggggcgttattgaaacacatgctaggaagtaccacgttgcacttttggagtatgatgagcatggagtggtaacttgcgacagttggagaagggtggccgtgagttctgagtcaatggtttattctgatatggcaaagctcagaacactgaggagattattaagagatggtgagcctcatgtcagcagtgctaaagtcgtcctagttgacggtgtcccgggttgtggaaagacaaaagagattctctcgaaagtaaattttgaggaagatctaatcttagtaccgggtaagcaggctgctgaaatgataaagaggcgtgctaatgcgtcaggaataattcaagccacaagagataatgttcgtactgttgattcatttataatgaattacggtaaaggaacacgctgtcagttcaaaaggttatttatcgacgaaggtctgatgttgcacactggttgtgtgaattttcttgtttctatgtctctgtgcgaaattgcatatgtttatggagacacacaacaaattccatacatcaacagagtatccggttttccgtaccctgcacattttgcaaaaatagaggttgatgaggtggaaactcgcagaactacgctgcgttgtccagccgacattacccactatcttaacagaaggtacgaaggatatgtcatgtgtacatcgtcggttaaaaagtcagtttctcaggaaatggtgagcggggccgcaatgatcaatcctgtatctaagccattgaatgggaaagttttgactttcactcagtctgataaagaggcgctgctttctcgaggatatacggacgtccatacagtacatgaggtacaaggtgagacatatgcagatgtgtcgttggtcagattgactccgacacctgtatctatcatcgcaggagatagtccgcacgttctcgtagctttgtcaaggcatacccaaacattgaagtattacaccgtagtgatggatcctcttgtaagtataattagggatttagaaaaacttagttcttacttgttagatatgtataaagtagatgcagggacccaatagcaattacaggtagactccgtgtttaaaggttctaatctttttgttgcagcaccaaagactggagatatctcagatatgcaattttactatgataagtgtctcccaggtaatagcaccatgttaaataactatgatgctgttaccatgaggttgactgacatttctcttaatgtcaaagattgcatattggatttctctaagtctgtggctgcaccgaaggatccgatcaaaccactgattccgatggtacgaacggcggcagaaatgccacgccagactggactattggaaaatttggtggcgatgatcaaaagaaactttaattcaccggagttatcaggaataatcgacattgagaatactgcatctttagtagtagataaattttttgatagttacttgcttaaagaaaaaagaaaaccaaataaaaatgtttctttattttgtagagagtctctcaatagatggttagagaagcaggagcaagtgaccattggtcagcttgcagattttgattttgtggatcttcctgccgttgatcagtacaggcatatgattaaagcgcaacctaagcagaagctggatacatcaattcaaagcgaatatccggccttgcagacgattgtgtatcattcgaaaaagatcaacgcaatcttcggtcctttgttcagtgagctcacaaggcaaatgctcgaaagcatagactcaagtaagtttttgttctttacaaggaagacgccagctcaaattgaggatttcttcggagatctcgatagccatgtccctatggatatcttggagttggatatttcgaagtatgacaaatctcagaacgagttccactgtgcagtagagtatgaaatatggagaagacttggattagaagattttctgggagaagtttggaaacaaggccacaggaaaactactcttaaagattacacagctggtattaaaacgtgtttatggtaccagagaaagagtggggacgttacaacattcatcggtaatacggtgattattgctgcttgtttagcttccatgttgcccatggagaaaataatcaaaggtgcattttgcggagatgacagtttactatacttcccaaaaggttgtgagtttcctgacatacagcatacagccaaccttatgtggaatttcgaggctaagctattcagaaagcagtatggttatttctgtggaaggtacgtgatacatcatgacagagggtgtattgtttattatgaccctttgaagttgatttctaaacttggtgctaaacacatcaaggattgggatcacttagaagagttcagaagatccctttgtgatgttgcaaattcgttgaacaactgtgcgtattacacgcagttggacgacgctgtgagtgaggtccataaaaccgcacccccgggttcgtttgtatataaaagtttagttaaatatctgtccgataaggttctttttagaagtttgtttatagatggctcttgttaagggtaaagtcaatattaatgagttcatagacttgtcaaaatcagaaaaatttcttccgtctatgttcacacctgttaagagtgtcatgatctccaaggttgataagatattggttcatgaagatgaatctttgtccgaagtcaatttactcaaaggtgtaaaactcattgatggtggctatgtacatcttgctggtcttgtggtgacaggtgaatggaatttgccagataattgtcgtggtggtgtcagtgtctgtttggtcgataagagaatggagagagcggacgaggcaactcttgcttcatactataccgcagcggctaagaaaaggtttcagttcaaagtcgttccaaattacaacatcactaccaaggacgcagaaaaggcagtttggcaagtactagttaatattagaaatgttaaaattgctgcgggttactgtccgctgtcattagaatttgtgtcagtgtgtattgtttataaaaatattataaaactcggtttgagagagaaaattacgagcgtcacggatggagggcccatggaactatcagaagaagttgttgatgagttcatggaagaagtcccgatgtctgtaaggcttgcaaaatttcgttcgaagaccggaaaaaagtttagtagtaaaagtgagaataatagtggtaataataggccgaaaccagacaaaaaccaaaggaaggaaaagggtttaaaagttagggttgagaaggataatttaattgataatgaattggagacttacgtcgccgattcagattcgtattaaatatgtcttacacaatcgcaactccatcgcaatttgtgtttttgtcatcagcatgggccgaccctatagaattaataaatttatgtactaattcactaggtaatcagttccaaacacaacaagctagaacaaccgttcaacggcaatttagcgaagtgtggaaacctgtccctcaagtcactgttaggtttcctgacagtggttttaaggtgtataggtacaatgcggtactagatcctctagttactgctttgttaggagctttcgatactagaaataggattatagaagtcgaaaatcaggcgaacccgacaaccgccgaaacgttagacgctactcgtagagtagatgacgcaacggtggctataaggagcgctataaataatttagtagtagaattggtcaaaggaacaggtttgtacaatcagagcacatttgaaagtgcatccggtttacaatggtcctctgcacctgcatcttgagataatcgagatgcttaaataacagattgtgtctgcaaacacacgtggtacgtacgataacgtatagtgtttttccctccacttaaatcgaagggtagtgtcttggagcgcgcgggacaaatgtgtatggttcatacacatccgtaggcacgtaataaagcgagggattcgaattcccccggaacccccggaggggccca

SEQ ID NO: 671 - DNA, 11519 bp, Celery latent virus
  source 1..11519: mol_type = other DNA
aaaatttaaatttatgagcaagagaatatatacgattattgttgttttgtgctttcaggtttgctttcaaaatctccgaacacagcctacacaatcttcacataccttctcaacaaatccggcgatccccggtaccgacgctcttcaatttgaagaaaacgcaaacttaacttactctaccataaaatacaatattttaaagtttaatttaaattacaaacaatcaatcatgtctgtggtctctttcgggtcaatcacgagcatggacttcgatgctgcatgtctagcagctatgatcgaaacccctggtggctctattccaccaactccacaatcaccacccacttcaccagtggcggtgaaacaaaggaaaattttaaattttccaattgccaaaatcaggacaactcctgatgcatcttttgagatgtgtgtgaagttccccgagagcttcattgattccttctgtgctcaagcacagaaagaattaaaatattggcacgctgctattacgcagttgaaattctttggtggtgagacaccaaagactcttgaaaccttggtgaaccaaggtcaagctcacactcaccaagttattttaaacttggttaaaatccttgatagtgctccaaaagcaattcaaggaaagaaggagttggaaaatttcttccagctgagcccacatggaaacaattccaaagaaccaattgacgttagtcgaaaggtttatatggaaccgtgcaaaataagtccacgcaagcgacaagtgtgctcctgtgacaatgacgatgatgcacattatcattgttactattgtgatattgtgtgttcaagcaaaaatctattgcaagaacacgaaagggatttttgcgaggatgcacagtcagtgcaagcatttgggtataaacttgagagtccaaatgtctttgacccaccccatgtgacgcagcaaaggagtgttgcaccatctttgggaaaaactttggaatctcctgtgaaatctccagagcagtcaaagccaaacctggagaaaagtttcccactagtggaatcttccaccaacagtggcatgatcttctttggatcaatagctaccatggttccgtctcatattgaaaaatatgtgaggaattgtgaaactgagaatccgattgatgcagctgcatcaaatttggcgatgcaagaagctaaaagctctggcgctccttgtatagtagtgcatcataaggcactaccaggtggaaagaaagattttctttttcctcataactctcctcaagttgtgagaactgaaaccgaagagccaattgctggtaccattgatagaccaacaataaaacgtgctttatttacccgcattaagaagaaagcacaagaaatttgtgtgaacccagggggaaccatccagagaaaaacaaagcgatggttgcggccagcggaagttgcacaaattgtgcgagctacctctgatccacaacatccattgttcaaggtggacgttactcaaattattgaagttgttcatcctgtttataggactgaaagaactgaagttgtgcagcaatgcataacaaggggaacgtacaaattgatgtctaaagcccaacaacggaaggcacgagcaatgcgctcagctggaatgttagtgatcactgataacccaacaacgcattgggtatctgaacctcagaaaatgctagtggtaaaggaaaaactgagcacaacaaagcatgtgaaactccggaatgttgaagtgaatgctgaatctgaaatgttttggggaactaaaacaaaggagggaccctcgaaaacagccttaaagcgctgtaagcgtaacatcgatcgcttggctcttcttgatccgcaaatgggtgagtctgcgaatggtgaatgttggatgaacacctttaagcaccatttaaaagtggggagcattgatattcttccaaataaggttcgtttaccaaaccttaggtcggcattctcacgatggatacctttggttgattatgttgaaattttgaaatttcattgtaagtcacaaccaaagcttaaaagggttgtgatacctactccagttacttatctggaaggttctagatatcacattcatgttggttatagcaagaactgctcatggattacggtcgaacaactaattaggcaattgcagactctgttaacatcatccaaatatggagaacattttaagagagcaattgttggtggtgaaccggaagacaaattcacaccagtggttcctatagttgacgtggaaactgagagagctaaatctagcttggcaaaatggacaactgcgcaacagagatatatgggatctattagaacccgaatcaactcacaagcagaaaaacataaaatcgattcggaaaaaaagatctggataccaatgaggcacgacacgatggatatgttaactccaccatatcttttcgaaaatgggctgagaaacaacgaagttcaacaagtcggccaggttcttggagattctgtagatcgtgctggaaacagttcaggtcagagttctcaatgccaacaacaaaatgtggcgcttgcatccgaaggaaacaacgacaacgtgataaacgagagcgtgcgcagcattcaaaacttagttactgccaatatgcagttgcaagagcaatgcaaattgttgctcgcctcacacgaacaagctatcatggactccgtagaacacggaaacttggagattcagaagcacgatgtagaggtctcgcagaaaccatcaacgaggaaaagcgactcacagaggaatttgcaaaaattctcattgaagaaaatagtcgcctcagaagagatgtcgagaacattgggcagaggatggagaaaatctgtcacctcaatcggtgttccaattgtgagtgcttccattgcagaagctttaaatcaagtcgttcaaaggggaaatacttcctggcttgatgtaggcatttctggaacattgttgaagcaatgtactctttttgctacgagaacttttcaagcgtattgtagctacaaattagcacgaaacgtgctgacattaaccgtgggagaattgtatgataatgtgaaatcatacatcaactctataatgggttccacagatcctgaagtgactggtttcttgtcgcaagtacgtagcgcaccttcaatggtgaagatggccattttgctcacaatgtttgctatctcggtgaaattaatgagaaaattcttcaaggtgaagaataatggaactagctttactgtaagcggagagaatgtctctgcaagccagttgcgaatctcagcacaggctcaagctcgatcaactgacaacatgaccccaactgtaaagaagctttgtagcattcttggaatgattggtttggtttgttgttgttacgatagaacaacatgggcatatcaaaaggattggatggatgcttggatcacaagtatcacatatgccggtgcatctgatagtatttgggaatcaatttcccatccatttgaaacattgcataacattgcagtgagtggaggagatcgttcaccagaaactacagctcgtttggagcgaattttggctggtgcagggttgaacgcacaagcccaagcacttgatgaatttggagcgtctagctcagtgatgggtcagacactgcaaaacatattggatgaggttgaaagtacaaatgtgtcaatcgttagtgaaatgaaagcattgccacactaccaccgaaatgccactaccttcaatcaagcggctcgtgatttagtgactgaaccagatgcaacatatcaaatgttgttaacagcagcaactggtactggaaaatcaacgcttttcccagtgcacctaaggtcacaatctcaaaagagagtcttgctgctcattcctctcgttgcagcaacacatggagtttaccagcgacttaaaagtcaaagggtgaatgatattggttaccatgctgattcaatatctgaaaacccaaatgctaaattaatcatctcaacatatggacacatgtgtgtgaaattacttggtggtcaaaacccttttgatcaatttgattatattttagctgatgaatgtcatgttgtaacactcgagactgttacagtgatatcccatttactccaacagcgagaaatggcgacgtggaaaacagttttcatgacagcaacaccattcaacaatatcacacttaatagtgttgagacagaacagcctgtaatcatgcaacagaccgagcatttccacaaccccaaaagctttgtagattttctaaaagctggcggcactgaaagagtgcaaacatatgctaagggaggctgcatcgtattctgttctacccaaaaagaaactgaggaatcagcgaaagctcttaaagcgagtggggttattgcactcttttaccatgcctctaaccgattggaatgggattcctttgcaaagaaaaatgagcgaagcatgggacaattaaatttttatctctttgctacaaatgcactagaatctggtgtgacgatccctatgaaaagttgcgttgattttgtaactaaaatgcatccagtagttggtggagataggaagactattactatggctccaacttcaattagcattcaagagcaattgcagcgtcgaggtcgagttggacgaacttgtccaggtgggtatctatacacatcagttggaaccccgttgatgtataaacttgacccagattcatccattaagtacttgttgtactgttggaagagtggtatcaaatgttataaggaagcattaaatattcctgatgaatgcacgataacattcactaaagagaaaattggtgctatttggacacatgacacaccgccagttgttacagcagccttagtggataattttggtgcagtttacaggaatgcaaacttcttcttagcatcacatcgaagaaattatgtggaaattccacatacaactgatatgattctgccctcaactctctcgacatgggagaattttgaattggatgggaatgaagtatcagatggcacacgaatgagagtaccacaaaatcatttctttttccgaaacgaaagggtccaagagagttggttgaaattgcaagctgcaattcttactgaactaactgaagcagaagccactaagaagcgagatatagttatcgagaatctgatggcgcgtcgagtatcgggccatcctgcttcgaagcttgaaatagctagaatgataatggccaaacaacaagtggtacaacaagcaagagacacgaaacgtgttcgagaaacccttagtgagagtatatctgattactccggcatcttctcaaacttttctggaatattttcagttcaagaaagattgaaaaaggcttctatcaaggctaatgaggaattagatatggttattcaggaaaatgaatcccatattttatttctacaagacatgataaaagaaactcctgagatcatccctgatatggctttagaggagcagatccaacatatggaatatgcaaaagccatattggaaaatggttggatcagtgggaatcctcaagcaaagcttctcattatgcgcacaacgcataaaaattttcatgatcttgttacaaaaaccaaggatgggacctatcgcatgaaatcatatgtgcaacgcatgttcgattttgtgaagaaacatccattgttaatttttatgtccattatgatgggaacgtcattagcagcaggatacttcatgatgagtaaagactctgaagatgacgatgcaatagtgcaggacaaggttttcaaacgcaatgataaggcaatgctggaatggtgcttgagaggcaaagcatgtaaatgtgacgccacacacttcgaggcacagtatgtacttgattcacgtcattatagaactattctcgaagattgggtaaagttcccattgcgagggttccacaatatacaaatagtaaactatggcacagtgagcaaatatgcacgtgctctagctttcctatcagtttgtgcactcttagctaacccgactatggtgtataatagcgcagcacattccatggctggaaatagtgagtataatgagtcagtagcaaaatccctaatgcacaatattctaagagattggaatagagtcccgctcatagacttattggtaaaagggatagatggaagtgatgatcgttatgatcagtacatacatgaattatatacaagtggaggcctaattgcatttgaatcagacactggaaagtttgaaggaaaaatgtctattagtcaatatcgaaaggatgctgctaaaggacaaacaaaacgtagtgcagcttcacggtcacgtgaagaagatcattatgatccgagatcatcaggtcgactcaagagtgggatcagacgagcatatcgtcaattctataatattgaagattctgatgtgcaggaaattatcctcacaaacaagaaaggagctccaattcttaaaattgggagtcttgatgaattgaaccaacatgttgatcttctaaaattctcagatccagaattgtatgagttgtatttacatgctcgagataaattggatcttgacgaacctgaaagttcaagcggcttcactggaaagtggggtgactatgcggaagatgatgaattcatgaagatgatatcagctttagattcgttaacaaaacaagcttcggaggaagcatttataccagttcaagtgaaacttcgagatgggcgaactgtccaggcaaatgtcgcacgttattggcaaaaagattatccaactggaaaatctgtgaagcaatgggctcaaactacttgggctccaccacaattcacagctcttcgagaaagggtaggaaaagctcttgaactgattcctgaatcgcgaccaattcatcttcatggaaaagtcccaaatggaacacttatagagttccaagatgcaatgaaagatctgcacgagaagacagcagtcaaggctgtagctgaggctaaaatcggagatactcaatttgaggcggatccttctgatgtaacaagccgggttggtgtggttatggtgaaaacatcagcaaacgctgaatgggaatcatggaaccaatgtgttgctttgaataacatagtgatttttccccatcattacacgcttaaagatggtaataatttgagattcaagttttcatcaagtgatttcgaaagcacctgtcacattgtggatgggtacaatgggcttgacatggcttgggctccaattaacgttaaaattcgtggtttgaagaagaaagtttgtttaggcacgccgcggaatggatcttacctatggcatttttccatgattaatcaagggaaagatttgccagaggctcgtcttatgggatactcctctgtaacgaaagtacaagaagagtcgcacccatccttcgattggacacatacagtctcaacgcaagttgggaactgtggtggaccctttgttgataaacatggtgtcattgttggatatcacactggagcttttcaattgggacaatttaatactttcctgggattatcagcaccactaattgcacatctgacaaaattggatgtcaaaccaagtgcccagccccaatcaaagatgatttggagggaagtggatttttatcgatcaccaaattacttacccccaaccattaataaccaagagccaattccagaggagtggagatatccagaaggtaaatctgtttacccatgtgttgatccaggatggatgggttctcgtttggtgaagggatcaggttttcgtctcattggaaaaatgcaacgtcatgtggaatattcaacgaagatttcccttaatgagcattttgacatgtggatgtctcaagagaaaactcaaaatgagttaactaggctgaacaaaaatcgtgtagagaaagggttagagaaagctttcatcagtcacacgatagcagctcagaacaaggaagctgcaattaaagatacgagcaagtatgctagaacaacgttgggaacatattcagaacctttgttgaaaagagcgactgctctgacaatccaaatgctcgaggagcatattaagctatgtaaacgccaaccactggatttagtctatggggatatggaatggaacacagcatgtggagcccagtacaatggattgaaatcagcatttagggatcaagttgttggcatcgagaatatggatgcttatggtcaatactgctgggagcgtttcaacgttccaaccgatcaatacaaaccatgcatttggacaaattcattgaaggatgagttacgaccaattgaaaaagtgaaggagaataaaacgcgcactttcactgcagctccaatcgagtttgtaattggtgctaaacaagctgttgatgcattcaatcatcaattcatggatgcacatttgaagctaccacataccgttggtattaaccaatggtcagggggttggcacaaactatacaagaagttgtatggtaaaaactttgtgtactcaagtggagatggaagccggtttgactcaagtccgtgtttctatatgttcgatgccttgtacacaatacgtacatattttgcagatcctgaaatacaccaggttctggagaatatctacttggaggtttgtcacactccaatagtgttacacgatgggaatgttgtgatgaagaatcatggaaacaatagtggacaatgttctactgttgttgacaatagtctcattatgatgattctatgttgcgcctcttatctagagcacactccagctaccatgcattccctcgatgcaataaaaagccattggcatttttgtgtgaatggagatgattatattggaggaatgtcaccattgttagcaagccatttgactaaagagaagatggcaaaaaccttcagtgacttccagttcatatatgagtggtctgattattcaccatcattatttgaacaagattatatgagtttaaaattcataaacattgttgaacgaaaaggacaaacaactggacaacagttaattgctccatggcgtgaagcatcacgacaactctccactttggctcacacatcaagtggtgcacctgaaatcaaattacaagttgctctaaccgagagggtgaaagcatgggttgataaagatttatttgatttcataacagaatactgcagatggctcgtggagtatttcgatagatttacgaacacgcaagcatggaatgaagctaagaagttatggtgggatgaacaacaaattttcaaccattatttcagttttgaaagcatttgcaatgcgccatactcacaaattgtaaacgaaactcctgatgagttctttgctaatggtgtgagagagtcccgaccattgcgaatcctacgcgatggcatcaaatttggtgttgctgttacagcagctaattatctgggaccaagcgatcacgatgtacccatgattgcaaacacaatgcttaatgttgccaagataggtctcgcaaattcaacagccgagcggattgaccgtatgctatttgggaaggaaaaccctgaacatagtagagcggattcgctagttgttgtaaaaacagagcaaacagatgcgacgatctgtttgcgaactcactgcaaatgccaagcacagcacttcgatgggaaatatgagtgttgggtgagttccccatctgttgctataaaaatgtttgcaacattaaagccccggattctttccacaacgaaatttgttggagttaagtttctaccaaaaatactaagagctcatgtatgggccttatacctatctggattctcttgggaagaaacaatgcaaattgtgcaaagtcactaccctggcgagaaacagcaaagaaaagcggattggttcctacagcaactgctgaaagagctagtattgatattcaaagtgaaagggtcgaagtttattgagttgggagagcatgctcaagttcaagggaaaactcaactcgactctacacaagttgatatggatccaaattttaatgctgcagcttatgctgcaactcttcgaggaggaccgcactggggtacacataattcccaaggtctgtttgatgctattaaggtattaaaccccaatgcagcaaatgttgacattgggaatgcgcgaactgcggttcagcgcgagatgcagcggttgatagctgccgatgctccgcgacaacaaccaccaccacaagttggtggaggacaccaacaaccacctccagctggaggtcaaacgcaaggccagcctggtggttacacaccgagccaggcatttaccaataaatttggtaatataatggctgagcccgatgcccccctcgtgctcgactctcaagcaacaatgagggaagttgcccaaattgaggcagcttgggctcgtcttctagaggtgcaatctctagagggtcttggttccttctggaactacatgttttcctatgtgggaaacaatggcacctcatctggaggtgatcccagggattacatccctgcaggaaatgggcgagttacacttgcccaactaaagtccaaagctcaaggtgagcaatggcgacgttattggcgtagtcatgcgtcagacatgagggatttcttgaggcttcttcaagcttcagatagacctttgcctattcgttgggcaagaaacaatggcattaaagatgccaattacgagattgcattcgattttgcggatgcactcccagatctctcagctgcacaaatgtcaattattttagcagctaagaaccttgccgtaaggcgaggtcaaggccagatgcttaatgctggcaccaaggttggaggtcggtcaagaaccgaaacctatgaccaggctgtccgcgatgctgcggatgtccaattcccaggagcataattttattatgcaacacaacactctttttgactggggggtgatgtgtctggacttgttacagtctttttctttttcaagtgatgtggaatggaccttgaatcaaataacatttgattttggattcacatcattaatcttcaatagggtggatggccctccccttttggagtcgtacaggacgtatcctgttttatttagtaacatagcaataaacacaaaccaccatgtagatagccgtttcagtggtttggttgtgtgtttttcatttctgtcagaaaacttccaaaaatacaaaaatataaaatttttattttgtcattttggttcgttgggcccaagcgtcttgcatagcatgtcgttcattcctgaaacgagtcccccgatagtttcacaattagtgtaccggacaccttttaaaatcattttcacactttgtgatgaatttgtaaggcgtgtgcgcgtgaaaccgtggtttggacctttggaaagaggctacgctctgtaggtagttttcgatagaaaatggtttcccttaaggaaactgttttgttactttggagttccggcccccaaagtaaatttt

SEQ ID NO: 672 - DNA, 6552 bp, Black grass varicosavirus-like virus
  source 1..6552: mol_type = other DNA
cgccaatttcaaccctcccctacttccgattgtgatttttcatcgcatcgagacacccacaggtacagggtcctagtgtctctaacaccaactagaattaatggtattgattttatgtactaaattgtcatctgttctacaggagagacggcagagtttcccaagcacaagcgagatcaaggccacgcataagctcgacaacagagcgtgcaacatcacaagctcataaagctcaatggatactctggagcacgctgaagccaatgagctagaagacgatgattactttcttcctgacgaaggacctcttcatgatatgcacttggctagtgcaatcaacttggatcagatacaggagttgatgtatccagggactataaagtacaagatagatattccctattatttaagggatgagtacatgctgatagaaagtttgtgcaaaggagacaagatcaaaatggagcttggaatgttggctccatctttgaaactgtccaagcctggaggagaattgtcaaccatggatttacctgcatataaagaaataggaaaccttgtctgtcaggctttgaggaatagggacatcatgattcctatctccatgaatgatgtggcgctgaagctcccaggagtaatagtctacaggtcatggggtatagcatttgcagaattgttgaagattatatgcacaagagcagaagtgatgaggggagggtctcagcctgtatatcaaggcactggaattgaagcaggtgcagcacattgtcagtttcaagtcaacggcaattggtaccagatcgttgcgaggaagaatctctcaacactatatgacaggcaagagaatgtaatgtatataggaaatatacactcattgcttttgctaatggataccatcggacagaggatttgtttaatggttgccaatcagatagcagaactttatgatacacctggatgggttgatcaaggaaaaattgaccaaatattatcaactggagatgacattctggaagaaatgggaaatgatggatatgaaacaattgctatgtttgaatctcttgttataggaaaggtgttgagagcaactcccgatgacatcacagaatgccataagtttttgtacaactgtatggatgaggtagaaaacatgctactaaactctgctatgagaggaagaatcattgaacttgttcacagatggttggccatatttgacagtttatcgatcaaagagttatcaaatgtcttttgcttatatcgatgttggggacacccggttgtaaatatctatgaagggatggagaaagtttacgacatcggcactgaagagaaagaagttagcccatgggtagcaactgacatattgtgtcagttcagaaaaactttcttgataaattattacgagaagcatcactactatccaaacgtcttgatatcagaagaggtagaaaactcatatgttgctcaatgcattaagaagggttcttcaatagaggagatgtatcctacttatgatactaaggacttcttgggaatcgaaatccagaagatatgggacattccaataacatttgacctttgtcacattcttaatgataaagcagtatctccgaaccagaaggagctaacagacagtgttgtcaggtaccaaaacactacaggaggtcagaacagaagagggctccttagatggttgagaggaaagagcttaaactgcagagagttccttcgggagatagatcagaacgggctccctgaggatgagtgtatcattggaatgtacgagaaagagagagaaatcaagatcaaagccagaatgttttctctgatgtcagaaaggatgagatattacttcgttttgacggaagaccttatagctaagcacgtgctggagctatttcccgcaataacaatgaaagattcacaaaatgtactccaaaagaaattttggaccgttggcggaatgggaaaagactccacattcgacgttaatatcaacatcgatttttcgaagtggaattcgaacatgaggaatgaattaactcaacccatgttccaacagttggataagatcttcggatataccaatttgatatcaaggacccacgagatatttgaatcatcgtttgtatattcatcttcaggcaagtatgttcccactgtaaagtttggaaaactccaagaggatcctcctatggcatatcgtggacataagggaggctttgaagggttgagacaaaaaggatggactgtagctacagtatgtgccttatctgcaattgctgagagaagaaatgtgagaacaaaactgatgggacaaggagacaaccagatagttagaatactgatgcccacccagagatggaaatcaaatgagcttactatcaaagaaatgatccaaaatgccaaacagatccaaaaagcctttgtaaccgatatggagagaacatttgaagaggctaaattgcctatcaaggtgagagagacttgggcttctacgagactatttatgtatggaaagatgatcctacatgacggagatgcgatgccccaatggttcaaaaaagtgctgaggtcatacgctctaaccaatgagggtcaagtcactgtagcaggggtggtaggaactattgctactaacatggcttcagcggcaggattgagtgaaatgcctgatgtcatgtatctcatatttgtagcaatgactgagtggtcgctcggttacttgttagagtaccacccattcacacggaaatgcatcctaagagaacatgagtaccatgtaaagatccccggagcacatagaggaagagattatagggtgaggtcagttaacaagagaagattggtagtttctatgatcctgataccaacggcagctggaggaagtgtaacagttcctctccctggattcattatgaggggattccctgatcacgcctcagaggcttatgcctggatcaagatgcttgcggaagtaaagagtccatacaaaacaatgttaaagaactggtacactttcatcgggaatgattctatccaacctgatatgttgatccagagcccgtcatcaatcaacttcttgaagccgccaacacccagctttcaagggagaatgaacgtaagagagctcttattgtctggagaatttgatcagaaccagttcatcaaagaagcaggaacaatattgggagtctttgacaggaagaaggtctgctctgcgatgttaacagacccaatgaaccctttcataacctcagaggtttattccacttatgcccatgtgtacatagacggagtgataaaaagagtagaaaacaccagtactatcaagaagttggcccaaaaggtgaaaaccaagactcaagtcattaaggcaatgatgtacaatgaacataacttcatcatgttcataagttggagagcaatgaaaagaggtaccatcgactatgattgtgcaacccagcaagctagaatggctaggaatattggttggggaagaacaattactggtgtgaccacacctcatccagtagaattggggattggtcatatatgtaaaggtagacaagatgaatgtcctccaacggattacatttatgtcagaataaatgaaaagggagaatttgtcccttatcttgggtcaagaatcaagtgtaaagtcgtatcagagcaagatatagatgccagaagagagccactgattgctgtgggttcgcgtatatgcaggtactcgtcgtggcttggaattggcccaaatctgatggaaattgttgagaaaaacctagctgttgtctgtgacacatctgtctatgacaaatttatagacgatgatccaaagggactgttgtcatcaggatctattgatcatagattcactccagcaggagcatctgagggagttttcatcaactatgcaccacagattggttgtaatgtgtacatgtcgagcgattgtatgccgacctatggaagaggccagaccaactacactttgcacttccaggctctatattgttggctgcaatacatctcatcaaggagggctgaaagtgtattcatgcatcatcacatagagtgtgaagattgtgtcgtaccaactactgatgaagtccccgacatccagtgcccctttccctatttcgataatatatatcccccaagagtaagggacagcatatcaagagccttgggattcattgataggaaaggaggactagatattatgagcaatgtaagatcattgtgtcatgaagctgaaccaggcatgtttgatgttagacaattgcaaaagggagtgatgtggacactagcaataaagatcggatttcgattgtaccatgggggattattcgggtcagatgataccagagttgaggaccttcaggagtatcccaggatttactcatataaattatacagagataccttactggtcaatgtggcacatgtgatgatgatgcttgcagccatagagatggataaggcacctgatggtgaggaactcgcaaaagtcagaagaagagcaactgataaactgttgtcgaaacccattggaagcttcaaggggttaggaggattaactctaggaaggactgatgagaatccagataacagtcatttgtttatgactggctcattcccagaaactgtattctcaatattgaatacttccaagactgcattaatagagacaattggtcagattggacgcttatccatcgaaggaatgggccatcttcctgtggccaaaggttctctgtccaataagcagtttcgatttctgataatgatgagatgtttgttagaatgcaggaactctcattactttcaacactttcagaagatcccagaggacgaaccaggacatccagcggaccctcaaaatgacgtttatagaatgcttgtcaaaactcccgttctagatatgagtctagacaagatggtcaaatcacttgctgttattaacgaaagaaagactcttccgataatcgaatggaataacatctccttcgaatcaacagaagtgatctgcaggacaggaactcccaggtccatattcatcggaaatagaatgatcgttgagcaaaatagtagaagagagtacagagaagtaactcttccaacatctagcatttacaagtgggctgggatcttgtttcacaaacccttgaaaagacatatcattgtgttgggagatggaacaggaggaacctcactgttggtgaaaacattcaatcaagactctacagtgtacccttgctcctatttagaaacccataagattattccccaagatatggaatgtttaatgcctcaattgtctagaggatatgagggaatctccgggcgagttttgttaaatgttccagatgatatcaaggatcctctctggtcagaaagaatgtctagtgagataaatgacatgggcgttgaaaggacctctatagtctgcgatatagagaccgttgggctatgtgttctccttgatgcattcaggagtttacctcaaggagttcaagtagttatgaaaacctatgccaaagatatattgactaatatcatgtcaataatgggcttgaatcaggtagaggtgggattttctccgcatctgaaccagagcaaccatgaagtgtttctaatgggacacatctcacagaattcttttccagatcctgacatgatgatcaatcaaatggtaaagctttatggtaaggtgagagctgatccaagatccagaatcctggaggaaatgaggatgataaacaaagtattcaagccattaaagaatacgtctgtgtctctatctctagctcatataaataatctgggaattactatgaccagggagatattacaactggatggacttgagatctggggatatgcactgcaatttgtaaatcgtcattatgttgacccatctcatagagcatttcttgctgacaagaaaacgatgaacaggaaaagaaagagagatttgacaagggcattcaggatattgctaggagtggttgtgaatccaggatacctggatataaaacgcaaatggggtattagaactcccaaggaattcaaaccaagaggaatgaaccttatactagccagagattgtgatgatatgggtgtcaaattaaccaagaaggacaaattggcctctgaatgccttcattgcttttggaccaggaagatgaggaaagctcctctagatgcaccagatccaccgggggaagattggatggaaagtgcaacaagagttcgatcatttgccagcagtttatctgagcactcttctcatgattacatcaatgtcattgagacagagtagtaagttgttagtttccgtttgatgaagatggccagcagggtagaagaaaaaactatcaaacttggatacaagcagcagatcttatataaaacatagtatcattcgtaattattgcaccagagatgaatctaaatggcgaccctgtgacctatagcgtcattgataacgcggtcagattgcacgtggaacgcagcacgtatgggtttatgtttgaggcatgt

SEQ ID NO: 673 - DNA, 11988 bp, Maize suscal virus
  source 1..11988: mol_type = other DNA
caggagtgagtttgcgtctcggttaacgttgttgtagccgtttgagagacaacgtatcgattccaacgccatattcttctcatactcatcaatctcacttgtcctctgtccgcccagacaccaacacaatcgaacatttcctctgatggctgaacagattaatcacgcagctccgcccaggcgacagccaagatggggtgcttcagctatgtcgaacttcagggtaaagacgaaagatctggctacacctgactctgcaaacactccggcccacatgattgggggcgattctcttcagctggtcttcacagataaagaagcccttactggtagattctttcttacatgcctgactctcgccaatgatgaagctgttactgcaccgcagacaatagcctactatttgtctgccatggctattgtatttccttcaatgaagcctgatgcccaggactggattaagcacgcaggttatcgtgttgagctagtagagactgaagaagatctggctgagatggaagaaatccaaccatggaggccaactccagagctagctatgatgtttgggcagtctgtcttgattgtgttcaagaatatctctgctgcaaattatctgacgtacatcagaagcagagtgaaggcattaaaagcccatgtgggtgcgttttctgattctattgatggtggagaagtcttcagtctggctaaagcaatggttatcagagctgcacttggaaacaacgtggagttcaagaagaaaatactgaatctcatgctggccactcgcgaagtcgctggagcttttccggcagcttgcaattatgtgtgtggaatcctggaatggaatgagatgacggcgattgtcatcatatacaagatgctacttctcaccagctcgccggtcattaatgataaggagatcagagatgaggtgcttcacctggctgttgcgtatgaaaagatcaaccaatttgagtatccccagtactttcgcattatggcttccaggagtagagcaagggtcctagagaggcatcactatcaggtcctcaccactgtcgctcaagtggcccagaaggaccagacaccatctcttgcccagtttgttgccagtgttcctgaaaacaatcttactgtgattcggctggtcaatatccatcgtcgtttcctggccaggactgcagaagacatacatctgaaggctgcagcattcctcactgcagttgaagaagaagatgttgatgaagaactccctcctcgtgcttgattaggacagtgaggttatacccaacagacatctaagctggtctctgcgatggtctttggcggctgagcgcctttttgtttttggtctacctcatgctttctcttttgctcttggtggtgagcagtcatctattagtctgtgagtcgttggttaatgtctcagtctttaatgctactagaaaaaagtgagaaacgacgaacttgaaagaaaaaatggagcggaccagcaagctagagcggctcattgcgtctagaagtctctcattcggagaagctttgatcgctcaatctctactaaactgtgcaggtcgagatcacttcatgtcatgtctgggagacactgagattgtgtttgtctgtaaccaaggagttgacccatctctggtgagaagactaatcaccaattgcaccaagaggagtgttgtgcttccatttcgcttacttgagttggccacttgctcgatactcacatccgcgggttatgcagcagcaactctctgtagtttaatcaacaaaatcctagctgggcgtgaaaacaggtttcttggagtgatgtacatctcatctggcattaacttcaacggcttctcatctccaggtgttttggcatggaccctccagtactgcggaccgctgatggtgagatctcaaagcgccagaaagacgcttggtctagtgttcgttgactcccaggtgtacagaacttccacagcctgtgtctttgtagactgccagtgggaagaagagattctgagtctaaccacagtcatcgaacgagtcaactcacataccatgaattatctgagttctgttgaaggcaaagctattttcaagcgtgctgccctagctgtttgcgcctatttcaatagtgctgcagactggtgaaggtcctggtgtaggtgaataaagtaagaagatagaagactgtgcacatgtaggagattcccctaataagggtatgtgtgatatttgcatgtctaggtagactgaatgtattgtaagtttgtcgtgcagcccacagccaacctctgatggcagcttgttgtctaactttgagccttcttggcagttggactaagaaaaagtgagagaccaagcgattactgtgtttctcaaccttgcgaaaaccggagctagttgacagcacgcgtgagttcaaggcgcaaactgcaatggcgagcggaagtgggctttcaggtcttacgagtgaaggtgtcgaaagcagaggaactagtggggatttggaagagctgccaggaggagggctgtccagagaagaattcgccacaggaggacaaaatttattggacattgctactcaagaccctcggtttgaccaggtcagggcacaatttgctgacggtgacgatgaagagggagacgtccctaccaatgaaaacacgttcgtgttcgggaccttttctgggtctccatctgccacccagcatactcaagccagggtcagatcaaatccagtgtttaaaaagaagagtggaggtgcaaatccatctgcaagcagcagctcagcaccggtacctccggtcgcagggaacccttttgggtcaccgcagccatcctcaggattgcctgctcagcaaccgcagctagcacaacagcccccaatgagtgcggctgctgcagcaattgccaagatggaagagcagatccacgcaatggtggctcaagtggattccactttgccacacggctacccatcggtggagtcagtcacgactgacactgagcggctcgctgcaatgatagctgacactccttatctttgccttgagacaattgattcgaagcatgttgtggcagctggaccatgggtcgtcaagataagctctgcccagctcaccctctctgcatatgaccagctgatcttgtctatcgctgggaggtactattcttgcttaccgatggcaccagcagatgatctcacagcacgatttttgcacatctgctcgcgatacggaggaggagaccaattcagatcgcaagaggtcgatgtggggctgaatgcttactggaatgaactgtcaagcgagggagttatccatctgccgactcttgcttccaaggttctgcttactggtgaagctatcgcggcacctcactattcagattctatgactctcgcagatctgaccaagagtttagatgaggtctggcaagtatatccaccgattcggacagtttataacatgtgctaccaagttgcccatgaaggattaaagtttgttagtcctcttcatgatgccttcaggtttaatgatgctgcggctttttatgtggaccggatagcttgcggttctgactatattcgattggagcatgttgtcattacaccaagggcatccaacctccaattcaaacaacctgaaatgcctttagttgtcccggtggcaaacccgccaccagaagcggccacaggagcaggagacatagctgcgcagacagcagctgcaactgggctggtctctgaaaggcgcagaaattctgcaagaactggagctgcaacttcaggcgccactgtgccgggatctggcactggtgcttctttagccgctgtcaatcaagacccagcgcagcctacccctgctgaccctcatagtttgctgaaccaagggttgcctgcacggcagccacctgtgcgagacacctcgaccttcagagatggtgtagtcgacttcaacggtgttttggttaaagttcatcagttattgtcaaaccaggcctcccaagatgcaaagttagaccttattatgcagaggctcagcaacattgaagccatggtggatggggttgacaaggcatttgctgcagtgataacacgccactcccgccaggatctgactcaccgccagacagtcaacagcactctgctccagccaagttcttcagaggcccagaatctcgccagcgggtctactccccctgctccacctcagaccaatcaggtccttgaaatcctaaagatcctggaaggaggtcatgccgacgagctgacccttgagctggttgctcggttgaaggctcttattcttgagaccggaaataccagggccgctcagaacatcaccattgagtcgatcaagtttgagaatgctaggaagaggactgttcagaggatcaaaagtctcttccaccttaactaagtgatgacctggtcagggtgtgggaattgctgtttcactaagcaatgactggtcaaataaatcagtttgagtcagtcggtcctaggtcgtgagccaagtgggtcaagtcagtctagttcctcagttcaagtcgtcgagtcttgggttatgctttggcagcccttcaaaaactagaaaaaagtgagagacttgagaataactttgccatcgtcctcctgcaacagctgagcgcactcttctcgccatggagacctttctagatgaacaatttgatgatatgctatctgaatttgagcaagcacggctgtctcggtttccagcctcacatcacagctcggctttaacatattatcctcaacgccatattctgtcattaatgtctccaaactgtcctgtgaaaccaactccccttctgcgggcatactgtgatgcggtcaataaagtatctgatctcttggggggtgggtgtgatgccacagacaacccagctccagtatactcttatatcttctctcagacaacggcttcttcgccagcctattatgacccagactatgaggatccatacctgctggattccctgcgagcagcctcagatgctgtgcttgaagatattgaagctatagaatctcatcatccgggtttttcgctggataaccagaagttgcgactgctgcggaaagtctcttcacgtctccatgcttcctgcaaacagatatttgcggtgcgaagaatgttagaaaaagttagaaatcaaatccagaaatgtcacatcggggttgatcacaagcttatgccagcagtgagattaggaaatttgagtatacacactgttagagatctcatcttcgtagccggactgcaaccattccccatgcgcatccatatactaaattacgatcagtggctaatgatctacgacacagtctgttgccgtgcaatggtaaaggtggcaactttatggaacgaggaattacgcactgacaatatcccttcatgggagatcgtgtcctcagtttataaatggggcgacgcacttttaaccaactatggtgtctcagcgtatgctattataggagaatttgaatcaatagtgactggtgtcttaattacgttttctgacactgacacactaggacttggtgcctcatttgtcaactcaataatggagaacgcgcaagagcaaagcagagcttataatatacctgcgaatgagacattgaagctgatatcattgcttagaactgttgagtctgtgaactggctgtcagagttgttcggtttgagaaagcattggggaaatccaatggtggacgcgcgagcatcgggaaaagcagttcaggagaaggtagatgaggtattgccagttaaagggactgcacttgtgaaattattggcatctttcaacaggatggttacactgtcattcatctctcagcatgggcaatggccggacggttactacctctcgaactcaagagactgcccgctgaaaagagccttcgaatcacggtctacccgtatcccagagactgtggaagggcatcgtcatgaagactgggcatgctttgtgtttctacccaactgcattttagactcatatgaagatgacctggcattaatatcagataaagctgtcagtgtgtaccgcgaacacttagattcagtctatgtgcgggctctctgtaataagcagagtcagggcacggttgaggaagacagaaggttgatgttagagtacttgaggaaacagcatatgccaatactggatattttcaaaatagtaatgacagacgcagtgccgccccgatggatggccaactgtgctagcatgaaaggaacagaaatgaagcacttgaaggcccgaatttttgcggtgcttacatatgagatgagacagtactttgctgcgtcagaagacatactgaagaacaacttatttaagtataacccgcatcagactatgactatgtcagaaacagagctattgactcgactaaaatcattaactactcaattggatccaaacagtcaaagccggcagctgagtgtaatccatattgttgatttttcgaaatggaatttgagaatgagatacactaatacatgcttggtattcaaatctatagacgatttcttaggaactccaggcttgtttgagaattctcatccactcttcagtgatatgctcaacatggtttcagacccattcaatcctccagcgttaggagtagaagagacagaatctgacactatttggagaaatcatcacgcggggtgggagggtcagcgtcagaagggatggacaatcttaacatctgcactcttgtctgacctggagagaacaaccggagttcatagtgaaatatgcggccaaggtgataaccaggcactactaagcaaatttcctgtccccactatctataggaatccggaagaatggatcaagagtgatcctacggaggttaggaaggtgcttgacgacttctatttgagattagaaaaggaatgtgaagctgtaggtctgaagataaaaacagctgagacctgtcgaagtctttgttttttcaactacgggaaaagactctatttcaaaggcagtgaactatccatgaccctaaaacggttctcaaaaaacataacccagcctaatgactcatacccaacaacagaggctattcttaagacatatgagggttcatcttatgcagctggcctttatagccatccaagtctgctgccatactggatgagtaaattctctgtagcccatcaattattcaacagcttcactaacaaccagctttgtgcagaagccccagtacagatgatgtccacctttgggttcccgatcaactaccgactgatcagcacgttgatgaagatcccagcatctctaggtggcccacctcagcagtgtctggctgattatctgctacgcggccatccagatccactatgcactgatttagtcgggttgacattgaagtcaaaggccgggtgtgtgatctctaagaagataattcgtctagctcaatctggtaaatggtttagccaacgcactctgaccagagattccctaatcaaatctccttattctctgaacctcagggtcccattatcagttcgacaaccaattgaagaggctgtgctcccggctgtgcgagctcactgcaacaataacttagtgaaatctctatttgatagctcgatggatgacgacgagagatatattcttgactctttaggtcttatgaagccgttccatccgctcgtggccaacgatatttattcaaggactttaccaggaagaagacagatgtttatatcaggactggcgaataccacgagcttaggtcgcctgattaaagggaattctgcgtttcctctgatctacaaagtcatggatttggagatggagcagctaaaaagctggatagtccagctaacagagcttctcggtttacctgataatgatgatattattcttcctcatcatatattagcgcaacagctgcgcgagaaatcgtggaatacagtcattgagggcataacagttccacatccgttagaacagttcatgcttactctatcaaaatcggacgtctgcaccaacgactgttatacagtagaacctgagcatattgtattggttcaacactccgaggatgtggttgtgtctcccggtgtggaccgtgaccacatcacagcagcgcggtcaaagaaagggagcccctatcttggcagccatatcggagaaggcattgtacagaagcagcttatttgtctaaatccagatacttcctggagagatgtcattagactaaacactatcaagcgttgggtggctccagaggggtctaggctgaggttgtttatgaatggaattataagctcgcggactaacatatctcgtgcctacatagatctcgccacaggcgttccgagtagattgtcttacaaccaccgggccagcctgatggggtcaataaacagctgctctatcagttcgaccacaaacatgcacacaaggttgtacttatcctcgaacagaatgggagattattctcatggtttgaaaaattatcacatgcctttcgggcccacctttctctgttatcagacgctcgtctgcttgatcgggatcttttcacctgagaaatgggcattccctagaaatgtttatcatattcatgtcagagactctagggtgccgccggtgtacgatggcgggttagagctagaagacctaactgtccttgatctgaaaggacacccgcctaccatccttaggtgcttagcctccaaactggtattcgaagcagcaccaggatatgcatcgttcggattttggtgtgagttcgaaacagcatcgaggactgatgcgaaatatgggtatgcccaacagctgacgggtggtttgttcattcaggagacggttgtaagagaatctataacacacgacaggattgggagctttgcatcgagaccggctgtcatatcaattggagacatctcattgatcgagccatctctattccttcgttccatcgcctggggtatgctgttgctcgcacctatgcatctgctgcatttcagaggcaaatatgcattcaaagtttcctgcgtggaatatgtcaatcttttcagccgagctttttggtcttcatttgaatccccaatgagcaacccccgaataattaggaagctcggaaagcatgtcgcgttgatgtctagtcatagtctaggtaggctagattccggcatcatcccagctctgcagataataatcgttgaagagatgtggtgtatcatacattcgatcgccacctatttccgtcgaggaggtgataaaccgaatatcccccccatctttgccccatcgggttctgctgccctactcctcacctcacgagtgatagaaatgatggtcactatacggctagtagttgggaactgcagcatcagtaagatagtagggttcccaagagatttctcggcaaatcttatgagtgtgccgcagccaatatctgccgcagctctgatcgtgatacaacatgacttcttagaattgcagcgtcacttgaaactgccattacgggacatggtgatacccagagtgttctcaacccattacccctgggttgatatcttaaggaagactgacagtgtggaggcagacgatgaagacccgcagaggcaattagtcctcccagtcgactttccgcagtgtgctaatgtagtagaatttcgtatccctgagaaccctgtgttggagactactccacaatgtgactgtaaaacgacacaaagaaagagagatttacatgatgaatgtttcttttcgctgagtgggaactatagcaaatcccacctcaaaattctggagttgatcttttcgttccacctgcctatagcaaatctctgcgtgcttggctctggcactggttctgaagcatgtgcgttaagtaattatctggactgcagacaggtttatgtgaattgctaccacaaactaactgacttctccccgcatgctgcttccacttatgttccgcctgcattcaggtctgatggtatagtgactaagctcgtctctccagcctctgctgtcctaagtctgtcagatctcacggacatcaggactgcggatgctatatatcagcacttaagaggtattgctacaactggtatcatttgcgatgcagagattccaagtgcagcaactcctttactctactcacagataatgcatacaatagtggcagttgtgaggaagaaagcctctatcaactgggtgttaatcaaagtgccgatcttctgtgttcataagcttcttggcctggcagctccactagctcaggccttccatagaatcatctttgcttatccagacttcgggaagcctcattcaagtttggtctatattgtcgctactattcgggctaaggcaactccaattgaagagaataggctgcctactgtaatgcttgaagacgagatgctcagagagatgttggcctctatcagcagtcagaaccattgtagattatatgagatgagggtagcggatagaataagtcggttaagccttaatctaacccttcctcaaagcttgactgtggcttcgaatcggtttgtgcaaggcctgatcctcactgaagacgaaatctccgacccggaacaagttataaaggtactgaaggctgtgaggcaagggttgttgacctcagcacagaaagtagttgaaactcatttccgagttcataatgaaatcacaatgccgaggtcagctgtcctctctgcggatttaggaacccttcacggacagttaaacaacacatacctgaaagtcgctaaatgtgatctgctgttagagctgttgcaccttattcatcctaccctcgaacagatcaagaatcgtgtgtacagctggttggctacagcccactcgtatagaatgagaaacaggaacttcaatgtctacatcaaccagaccagatttatatcacatgattctagatatttattcgaaatccttggacatcttatgaaaagatctgttcccacagttggactccccatccatatggattaccatttattcggatctaggacactgaggcctaagcaacttattgttccttgcccaataggcgtatgtcgaagtccatcaggtagaactagcaaatggaagtggcagaaacgaagtgagatacttggttgggcaatctcattaaccctcacaaatttaccgatagcagttgaggatcataatagcttttcgctggatttcctacacgaaaaaggcatcttagaagatgttcgcatgatggcctcattaaacccatcccgcatagaggtcccttacttctttaggcccaatgagatggccctcgatttgttggcgcatgaccggttgttccttgttgcgccgttgaattctttctcactactcagaagccgttacacaaccgttgagccatactttgttccttggtcgggggcccctttagcttggtgtctattttatctggaggagcggaaccaaattgatagcctgattgtggatgagatctgccttgatgatactctgtcggtcaacacttatgtcgacacagacagcatgtcctgtagatgcctgagctgcaaaacggaagaagtcttgggagagaggttttcgttaaataccaacgatctggatttcctgtgttctcttggatctatagagacagtctatgattctgagcatgctttgtaggggcttatcgctcgcagggactaataaaaagtgagtatgtgtaagctgagccaaagactgtatcgccagttttatctaaaagtttattgtgaacttaatttaaagttcctatctgttcccatttaataccattaagaatgtggtcccagctcacctcttgtctagtccaattaagctgcagattgtgttgggtatgacataggacatatgggagtgacaaagttgaggtaataggagaataaaagtggaatcgacagtagtatcggcttgtacaacgttgagcgagacgcaaactcactcctg

SEQ ID NO: 674 - DNA, 76 bp, Tomato brown rugose fruit virus
  source 1..76: mol_type = other DNA
gtatttttgttttacaacatataccaacaacaacaaacaacaaacaacaacattacaattactatttacaactaca

SEQ ID NO: 675 - DNA, 13 bp, Celery latent virus
  source 1..13: mol_type = other DNA
aaaatttaaattt

SEQ ID NO: 676 - DNA, 235 bp, Black grass varicosavirus-like virus
  source 1..235: mol_type = other DNA
cgccaatttcaaccctcccctacttccgattgtgatttttcatcgcatcgagacacccacaggtacagggtcctagtgtctctaacaccaactagaattaatggtattgattttatgtactaaattgtcatctgttctacaggagagacggcagagtttcccaagcacaagcgagatcaaggccacgcataagctcgacaacagagcgtgcaacatcacaagctcataaagctca

SEQ ID NO: 677 - DNA, 142 bp, Maize suscal virus
  source 1..142: mol_type = other DNA
caggagtgagtttgcgtctcggttaacgttgttgtagccgtttgagagacaacgtatcgattccaacgccatattcttctcatactcatcaatctcacttgtcctctgtccgcccagacaccaacacaatcgaacatttcct

SEQ ID NO: 678 - DNA, 200 bp, Tomato brown rugose fruit virus
  source 1..200: mol_type = other DNA
gataatcgagatgcttaaataacagattgtgtctgcaaacacacgtggtacgtacgataacgtatagtgtttttccctccacttaaatcgaagggtagtgtcttggagcgcgcgggacaaatgtgtatggttcatacacatccgtaggcacgtaataaagcgagggattcgaattcccccggaacccccggaggggccca

SEQ ID NO: 679 - DNA, 583 bp, Celery latent virus
  source 1..583: mol_type = other DNA
ttttattatgcaacacaacactctttttgactggggggtgatgtgtctggacttgttacagtctttttctttttcaagtgatgtggaatggaccttgaatcaaataacatttgattttggattcacatcattaatcttcaatagggtggatggccctccccttttggagtcgtacaggacgtatcctgttttatttagtaacatagcaataaacacaaaccaccatgtagatagccgtttcagtggtttggttgtgtgtttttcatttctgtcagaaaacttccaaaaatacaaaaatataaaatttttattttgtcattttggttcgttgggcccaagcgtcttgcatagcatgtcgttcattcctgaaacgagtcccccgatagtttcacaattagtgtaccggacaccttttaaaatcattttcacactttgtgatgaatttgtaaggcgtgtgcgcgtgaaaccgtggtttggacctttggaaagaggctacgctctgtaggtagttttcgatagaaaatggtttcccttaaggaaactgttttgttactttggagttccggcccccaaagtaaatttt

SEQ ID NO: 680 - DNA, 221 bp, Black grass varicosavirus-like virus
  source 1..221: mol_type = other DNA
taagttgttagtttccgtttgatgaagatggccagcagggtagaagaaaaaactatcaaacttggatacaagcagcagatcttatataaaacatagtatcattcgtaattattgcaccagagatgaatctaaatggcgaccctgtgacctatagcgtcattgataacgcggtcagattgcacgtggaacgcagcacgtatgggtttatgtttgaggcatgt

SEQ ID NO: 681 - DNA, 303 bp, Maize suscal virus
  source 1..303: mol_type = other DNA
gggcttatcgctcgcagggactaataaaaagtgagtatgtgtaagctgagccaaagactgtatcgccagttttatctaaaagtttattgtgaacttaatttaaagttcctatctgttcccatttaataccattaagaatgtggtcccagctcacctcttgtctagtccaattaagctgcagattgtgttgggtatgacataggacatatgggagtgacaaagttgaggtaataggagaataaaagtggaatcgacagtagtatcggcttgtacaacgttgagcgagacgcaaactcactcctg

SEQ ID NO: 682 - protein, 1615 aa, Tomato brown rugose fruit virus
MAYTQTATTSALLDTVRGNNTLVNDLAKRRLYDTAVDEFNARDRRPKVNFSKVISEEQTLIATRAYPEFQITFYNTQNAVHSLAGGLRSLELEYLMMQIPYGSLTYDIGGNFASHLFKGRAYVHCCMPNLDVRDIMRHEGQKDSIELYLSRLERGNKVVPNFQKEAFDRYAETPDEVVCHSTFQTCTHQQVENTGRVYAIALHSIYDIPADEFGAALLRKNVHVCYAAFHFSENLLLEDSHVNLDEINACFSRDGDKLTFSFASESTLNYCHSYSNILKYVCKTYFPASNREVYMKEFLVTRVNTWFCKFSRIDTFLLYKGVAHKGVNSEQFYSAMEDAWHYKKTLAMCNSERILLEDSSSVNYWFPKMRDMVIVPLFDISLDTSKRTRKEVLVSKDFVFTVLNHIRTYQAKALTYSNVLSFVESIRSRVIINGVTARSEWDVDKSLLQSLSMTFFLHTKLAVLKDELLISKFSLGPKSVSQHVWDEISLAFGNAFPSIKERLLNRKLIKVSGDALEIRVPDLYVTFHDRLVTEYKTSVDMPVLDIRKRMEETEVMYNALSELSVLKESDKFDVDVFSRMCQTLEVDPMTAAKVIVAVMSNESGLTLTFEQPTEANVALALKDSEKASEGALVVTSRDVEEPSMKGSMARGELQLAGLSGDQPESSYTRNEEIESLEQFHMATASSLIRKQMSSIVYTGPIKVQQMKNFIDSLVASLSAAVSNLVKILKDTAAIDLETRQKFGVLDVATKRWLIKPLAKNHAWGVIETHARKYHVALLEYDEHGVVTCDSWRRVAVSSESMVYSDMAKLRTLRRLLRDGEPHVSSAKVVLVDGVPGCGKTKEILSKVNFEEDLILVPGKQAAEMIKRRANASGIIQATRDNVRTVDSFIMNYGKGTRCQFKRLFIDEGLMLHTGCVNFLVSMSLCEIAYVYGDTQQIPYINRVSGFPYPAHFAKIEVDEVETRRTTLRCPADITHYLNRRYEGYVMCTSSVKKSVSQEMVSGAAMINPVSKPLNGKVLTFTQSDKEALLSRGYTDVHTVHEVQGETYADVSLVRLTPTPVSIIAGDSPHVLVALSRHTQTLKYYTVVMDPLVSIIRDLEKLSSYLLDMYKVDAGTQXQLQVDSVFKGSNLFVAAPKTGDISDMQFYYDKCLPGNSTMLNNYDAVTMRLTDISLNVKDCILDFSKSVAAPKDPIKPLIPMVRTAAEMPRQTGLLENLVAMIKRNFNSPELSGIIDIENTASLVVDKFFDSYLLKEKRKPNKNVSLFCRESLNRWLEKQEQVTIGQLADFDFVDLPAVDQYRHMIKAQPKQKLDTSIQSEYPALQTIVYHSKKINAIFGPLFSELTRQMLESIDSSKFLFFTRKTPAQIEDFFGDLDSHVPMDILELDISKYDKSQNEFHCAVEYEIWRRLGLEDFLGEVWKQGHRKTTLKDYTAGIKTCLWYQRKSGDVTTFIGNTVIIAACLASMLPMEKIIKGAFCGDDSLLYFPKGCEFPDIQHTANLMWNFEAKLFRKQYGYFCGRYVIHHDRGCIVYYDPLKLISKLGAKHIKDWDHLEEFRRSLCDVANSLNNCAYYTQLDDAVSEVHKTAPPGSFVYKSLVKYLSDKVLFRSLFIDGSC

SEQ ID NO: 683 - protein, 3640 aa, Celery latent virus
MSKRIYTIIVVLCFQVCFQNLRTQPTQSSHTFSTNPAIPGTDALQFEENANLTYSTIKYNILKFNLNYKQSIMSVVSFGSITSMDFDAACLAAMIETPGGSIPPTPQSPPTSPVAVKQRKILNFPIAKIRTTPDASFEMCVKFPESFIDSFCAQAQKELKYWHAAITQLKFFGGETPKTLETLVNQGQAHTHQVILNLVKILDSAPKAIQGKKELENFFQLSPHGNNSKEPIDVSRKVYMEPCKISPRKRQVCSCDNDDDAHYHCYYCDIVCSSKNLLQEHERDFCEDAQSVQAFGYKLESPNVFDPPHVTQQRSVAPSLGKTLESPVKSPEQSKPNLEKSFPLVESSTNSGMIFFGSIATMVPSHIEKYVRNCETENPIDAAASNLAMQEAKSSGAPCIVVHHKALPGGKKDFLFPHNSPQVVRTETEEPIAGTIDRPTIKRALFTRIKKKAQEICVNPGGTIQRKTKRWLRPAEVAQIVRATSDPQHPLFKVDVTQIIEVVHPVYRTERTEVVQQCITRGTYKLMSKAQQRKARAMRSAGMLVITDNPTTHWVSEPQKMLVVKEKLSTTKHVKLRNVEVNAESEMFWGTKTKEGPSKTALKRCKRNIDRLALLDPQMGESANGECWMNTFKHHLKVGSIDILPNKVRLPNLRSAFSRWIPLVDYVEILKFHCKSQPKLKRVVIPTPVTYLEGSRYHIHVGYSKNCSWITVEQLIRQLQTLLTSSKYGEHFKRAIVGGEPEDKFTPVVPIVDVETERAKSSLAKWTTAQQRYMGSIRTRINSQAEKHKIDSEKKIWIPMRHDTMDMLTPPYLFENGLRNNEVQQVGQVLGDSVDRAGNSSGQSSQCQQQNVALASEGNNDNVINESVRSIQNLVTANMQLQEQCKLLLASHEQAIMDSVEHGNLEIQKHDVEVSQKPSTRKSDSQRNLQKFSLKKIVASEEMSRTLGRGWRKSVTSIGVPIVSASIAEALNQVVQRGNTSWLDVGISGTLLKQCTLFATRTFQAYCSYKLARNVLTLTVGELYDNVKSYINSIMGSTDPEVTGFLSQVRSAPSMVKMAILLTMFAISVKLMRKFFKVKNNGTSFTVSGENVSASQLRISAQAQARSTDNMTPTVKKLCSILGMIGLVCCCYDRTTWAYQKDWMDAWITSITYAGASDSIWESISHPFETLHNIAVSGGDRSPETTARLERILAGAGLNAQAQALDEFGASSSVMGQTLQNILDEVESTNVSIVSEMKALPHYHRNATTFNQAARDLVTEPDATYQMLLTAATGTGKSTLFPVHLRSQSQKRVLLLIPLVAATHGVYQRLKSQRVNDIGYHADSISENPNAKLIISTYGHMCVKLLGGQNPFDQFDYILADECHVVTLETVTVISHLLQQREMATWKTVFMTATPFNNITLNSVETEQPVIMQQTEHFHNPKSFVDFLKAGGTERVQTYAKGGCIVFCSTQKETEESAKALKASGVIALFYHASNRLEWDSFAKKNERSMGQLNFYLFATNALESGVTIPMKSCVDFVTKMHPVVGGDRKTITMAPTSISIQEQLQRRGRVGRTCPGGYLYTSVGTPLMYKLDPDSSIKYLLYCWKSGIKCYKEALNIPDECTITFTKEKIGAIWTHDTPPVVTAALVDNFGAVYRNANFFLASHRRNYVEIPHTTDMILPSTLSTWENFELDGNEVSDGTRMRVPQNHFFFRNERVQESWLKLQAAILTELTEAEATKKRDIVIENLMARRVSGHPASKLEIARMIMAKQQVVQQARDTKRVRETLSESISDYSGIFSNFSGIFSVQERLKKASIKANEELDMVIQENESHILFLQDMIKETPEIIPDMALEEQIQHMEYAKAILENGWISGNPQAKLLIMRTTHKNFHDLVTKTKDGTYRMKSYVQRMFDFVKKHPLLIFMSIMMGTSLAAGYFMMSKDSEDDDAIVQDKVFKRNDKAMLEWCLRGKACKCDATHFEAQYVLDSRHYRTILEDWVKFPLRGFHNIQIVNYGTVSKYARALAFLSVCALLANPTMVYNSAAHSMAGNSEYNESVAKSLMHNILRDWNRVPLIDLLVKGIDGSDDRYDQYIHELYTSGGLIAFESDTGKFEGKMSISQYRKDAAKGQTKRSAASRSREEDHYDPRSSGRLKSGIRRAYRQFYNIEDSDVQEIILTNKKGAPILKIGSLDELNQHVDLLKFSDPELYELYLHARDKLDLDEPESSSGFTGKWGDYAEDDEFMKMISALDSLTKQASEEAFIPVQVKLRDGRTVQANVARYWQKDYPTGKSVKQWAQTTWAPPQFTALRERVGKALELIPESRPIHLHGKVPNGTLIEFQDAMKDLHEKTAVKAVAEAKIGDTQFEADPSDVTSRVGVVMVKTSANAEWESWNQCVALNNIVIFPHHYTLKDGNNLRFKFSSSDFESTCHIVDGYNGLDMAWAPINVKIRGLKKKVCLGTPRNGSYLWHFSMINQGKDLPEARLMGYSSVTKVQEESHPSFDWTHTVSTQVGNCGGPFVDKHGVIVGYHTGAFQLGQFNTFLGLSAPLIAHLTKLDVKPSAQPQSKMIWREVDFYRSPNYLPPTINNQEPIPEEWRYPEGKSVYPCVDPGWMGSRLVKGSGFRLIGKMQRHVEYSTKISLNEHFDMWMSQEKTQNELTRLNKNRVEKGLEKAFISHTIAAQNKEAAIKDTSKYARTTLGTYSEPLLKRATALTIQMLEEHIKLCKRQPLDLVYGDMEWNTACGAQYNGLKSAFRDQVVGIENMDAYGQYCWERFNVPTDQYKPCIWTNSLKDELRPIEKVKENKTRTFTAAPIEFVIGAKQAVDAFNHQFMDAHLKLPHTVGINQWSGGWHKLYKKLYGKNFVYSSGDGSRFDSSPCFYMFDALYTIRTYFADPEIHQVLENIYLEVCHTPIVLHDGNVVMKNHGNNSGQCSTVVDNSLIMMILCCASYLEHTPATMHSLDAIKSHWHFCVNGDDYIGGMSPLLASHLTKEKMAKTFSDFQFIYEWSDYSPSLFEQDYMSLKFINIVERKGQTTGQQLIAPWREASRQLSTLAHTSSGAPEIKLQVALTERVKAWVDKDLFDFITEYCRWLVEYFDRFTNTQAWNEAKKLWWDEQQIFNHYFSFESICNAPYSQIVNETPDEFFANGVRESRPLRILRDGIKFGVAVTAANYLGPSDHDVPMIANTMLNVAKIGLANSTAERIDRMLFGKENPEHSRADSLVVVKTEQTDATICLRTHCKCQAQHFDGKYECWVSSPSVAIKMFATLKPRILSTTKFVGVKFLPKILRAHVWALYLSGFSWEETMQIVQSHYPGEKQQRKADWFLQQLLKELVLIFKVKGSKFIELGEHAQVQGKTQLDSTQVDMDPNFNAAAYAATLRGGPHWGTHNSQGLFDAIKVLNPNAANVDIGNARTAVQREMQRLIAADAPRQQPPPQVGGGHQQPPPAGGQTQGQPGGYTPSQAFTNKFGNIMAEPDAPLVLDSQATMREVAQIEAAWARLLEVQSLEGLGSFWNYMFSYVGNNGTSSGGDPRDYIPAGNGRVTLAQLKSKAQGEQWRRYWRSHASDMRDFLRLLQASDRPLPIRWARNNGIKDANYEIAFDFADALPDLSAAQMSIILAAKNLAVRRGQGQMLNAGTKVGGRSRTETYDQAVRDAADVQFPGA

SEQ ID NO: 684 - protein, 2031 aa, Black grass varicosavirus-like virus
MDTLEHAEANELEDDDYFLPDEGPLHDMHLASAINLDQIQELMYPGTIKYKIDIPYYLRDEYMLIESLCKGDKIKMELGMLAPSLKLSKPGGELSTMDLPAYKEIGNLVCQALRNRDIMIPISMNDVALKLPGVIVYRSWGIAFAELLKIICTRAEVMRGGSQPVYQGTGIEAGAAHCQFQVNGNWYQIVARKNLSTLYDRQENVMYIGNIHSLLLLMDTIGQRICLMVANQIAELYDTPGWVDQGKIDQILSTGDDILEEMGNDGYETIAMFESLVIGKVLRATPDDITECHKFLYNCMDEVENMLLNSAMRGRIIELVHRWLAIFDSLSIKELSNVFCLYRCWGHPVVNIYEGMEKVYDIGTEEKEVSPWVATDILCQFRKTFLINYYEKHHYYPNVLISEEVENSYVAQCIKKGSSIEEMYPTYDTKDFLGIEIQKIWDIPITFDLCHILNDKAVSPNQKELTDSVVRYQNTTGGQNRRGLLRWLRGKSLNCREFLREIDQNGLPEDECIIGMYEKEREIKIKARMFSLMSERMRYYFVLTEDLIAKHVLELFPAITMKDSQNVLQKKFWTVGGMGKDSTFDVNINIDFSKWNSNMRNELTQPMFQQLDKIFGYTNLISRTHEIFESSFVYSSSGKYVPTVKFGKLQEDPPMAYRGHKGGFEGLRQKGWTVATVCALSAIAERRNVRTKLMGQGDNQIVRILMPTQRWKSNELTIKEMIQNAKQIQKAFVTDMERTFEEAKLPIKVRETWASTRLFMYGKMILHDGDAMPQWFKKVLRSYALTNEGQVTVAGVVGTIATNMASAAGLSEMPDVMYLIFVAMTEWSLGYLLEYHPFTRKCILREHEYHVKIPGAHRGRDYRVRSVNKRRLVVSMILIPTAAGGSVTVPLPGFIMRGFPDHASEAYAWIKMLAEVKSPYKTMLKNWYTFIGNDSIQPDMLIQSPSSINFLKPPTPSFQGRMNVRELLLSGEFDQNQFIKEAGTILGVFDRKKVCSAMLTDPMNPFITSEVYSTYAHVYIDGVIKRVENTSTIKKLAQKVKTKTQVIKAMMYNEHNFIMFISWRAMKRGTIDYDCATQQARMARNIGWGRTITGVTTPHPVELGIGHICKGRQDECPPTDYIYVRINEKGEFVPYLGSRIKCKVVSEQDIDARREPLIAVGSRICRYSSWLGIGPNLMEIVEKNLAVVCDTSVYDKFIDDDPKGLLSSGSIDHRFTPAGASEGVFINYAPQIGCNVYMSSDCMPTYGRGQTNYTLHFQALYCWLQYISSRRAESVFMHHHIECEDCVVPTTDEVPDIQCPFPYFDNIYPPRVRDSISRALGFIDRKGGLDIMSNVRSLCHEAEPGMFDVRQLQKGVMWTLAIKIGFRLYHGGLFGSDDTRVEDLQEYPRIYSYKLYRDTLLVNVAHVMMMLAAIEMDKAPDGEELAKVRRRATDKLLSKPIGSFKGLGGLTLGRTDENPDNSHLFMTGSFPETVFSILNTSKTALIETIGQIGRLSIEGMGHLPVAKGSLSNKQFRFLIMMRCLLECRNSHYFQHFQKIPEDEPGHPADPQNDVYRMLVKTPVLDMSLDKMVKSLAVINERKTLPIIEWNNISFESTEVICRTGTPRSIFIGNRMIVEQNSRREYREVTLPTSSIYKWAGILFHKPLKRHIIVLGDGTGGTSLLVKTFNQDSTVYPCSYLETHKIIPQDMECLMPQLSRGYEGISGRVLLNVPDDIKDPLWSERMSSEINDMGVERTSIVCDIETVGLCVLLDAFRSLPQGVQVVMKTYAKDILTNIMSIMGLNQVEVGFSPHLNQSNHEVFLMGHISQNSFPDPDMMINQMVKLYGKVRADPRSRILEEMRMINKVFKPLKNTSVSLSLAHINNLGITMTREILQLDGLEIWGYALQFVNRHYVDPSHRAFLADKKTMNRKRKRDLTRAFRILLGVVVNPGYLDIKRKWGIRTPKEFKPRGMNLILARDCDDMGVKLTKKDKLASECLHCFWTRKMRKAPLDAPDPPGEDWMESATRVRSFASSLSEHSSHDYINVIETE

SEQ ID NO: 685 - protein, 2338 aa, Maize suscal virus
METFLDEQFDDMLSEFEQARLSRFPASHHSSALTYYPQRHILSLMSPNCPVKPTPLLRAYCDAVNKVSDLLGGGCDATDNPAPVYSYIFSQTTASSPAYYDPDYEDPYLLDSLRAASDAVLEDIEAIESHHPGFSLDNQKLRLLRKVSSRLHASCKQIFAVRRMLEKVRNQIQKCHIGVDHKLMPAVRLGNLSIHTVRDLIFVAGLQPFPMRIHILNYDQWLMIYDTVCCRAMVKVATLWNEELRTDNIPSWEIVSSVYKWGDALLTNYGVSAYAIIGEFESIVTGVLITFSDTDTLGLGASFVNSIMENAQEQSRAYNIPANETLKLISLLRTVESVNWLSELFGLRKHWGNPMVDARASGKAVQEKVDEVLPVKGTALVKLLASFNRMVTLSFISQHGQWPDGYYLSNSRDCPLKRAFESRSTRIPETVEGHRHEDWACFVFLPNCILDSYEDDLALISDKAVSVYREHLDSVYVRALCNKQSQGTVEEDRRLMLEYLRKQHMPILDIFKIVMTDAVPPRWMANCASMKGTEMKHLKARIFAVLTYEMRQYFAASEDILKNNLFKYNPHQTMTMSETELLTRLKSLTTQLDPNSQSRQLSVIHIVDFSKWNLRMRYTNTCLVFKSIDDFLGTPGLFENSHPLFSDMLNMVSDPFNPPALGVEETESDTIWRNHHAGWEGQRQKGWTILTSALLSDLERTTGVHSEICGQGDNQALLSKFPVPTIYRNPEEWIKSDPTEVRKVLDDFYLRLEKECEAVGLKIKTAETCRSLCFFNYGKRLYFKGSELSMTLKRFSKNITQPNDSYPTTEAILKTYEGSSYAAGLYSHPSLLPYWMSKFSVAHQLFNSFTNNQLCAEAPVQMMSTFGFPINYRLISTLMKIPASLGGPPQQCLADYLLRGHPDPLCTDLVGLTLKSKAGCVISKKIIRLAQSGKWFSQRTLTRDSLIKSPYSLNLRVPLSVRQPIEEAVLPAVRAHCNNNLVKSLFDSSMDDDERYILDSLGLMKPFHPLVANDIYSRTLPGRRQMFISGLANTTSLGRLIKGNSAFPLIYKVMDLEMEQLKSWIVQLTELLGLPDNDDIILPHHILAQQLREKSWNTVIEGITVPHPLEQFMLTLSKSDVCTNDCYTVEPEHIVLVQHSEDVVVSPGVDRDHITAARSKKGSPYLGSHIGEGIVQKQLICLNPDTSWRDVIRLNTIKRWVAPEGSRLRLFMNGIISSRTNISRAYIDLATGVPSRLSYNHRASLMGSINSCSISSTTNMHTRLYLSSNRMGDYSHGLKNYHMPFGPTFLCYQTLVCLIGIFSPEKWAFPRNVYHIHVRDSRVPPVYDGGLELEDLTVLDLKGHPPTILRCLASKLVFEAAPGYASFGFWCEFETASRTDAKYGYAQQLTGGLFIQETVVRESITHDRIGSFASRPAVISIGDISLIEPSLFLRSIAWGMLLLAPMHLLHFRGKYAFKVSCVEYVNLFSRAFWSSFESPMSNPRIIRKLGKHVALMSSHSLGRLDSGIIPALQIIIVEEMWCIIHSIATYFRRGGDKPNIPPIFAPSGSAALLLTSRVIEMMVTIRLVVGNCSISKIVGFPRDFSANLMSVPQPISAAALIVIQHDFLELQRHLKLPLRDMVIPRVFSTHYPWVDILRKTDSVEADDEDPQRQLVLPVDFPQCANVVEFRIPENPVLETTPQCDCKTTQRKRDLHDECFFSLSGNYSKSHLKILELIFSFHLPIANLCVLGSGTGSEACALSNYLDCRQVYVNCYHKLTDFSPHAASTYVPPAFRSDGIVTKLVSPASAVLSLSDLTDIRTADAIYQHLRGIATTGIICDAEIPSAATPLLYSQIMHTIVAVVRKKASINWVLIKVPIFCVHKLLGLAAPLAQAFHRIIFAYPDFGKPHSSLVYIVATIRAKATPIEENRLPTVMLEDEMLREMLASISSQNHCRLYEMRVADRISRLSLNLTLPQSLTVASNRFVQGLILTEDEISDPEQVIKVLKAVRQGLLTSAQKVVETHFRVHNEITMPRSAVLSADLGTLHGQLNNTYLKVAKCDLLLELLHLIHPTLEQIKNRVYSWLATAHSYRMRNRNFNVYINQTRFISHDSRYLFEILGHLMKRSVPTVGLPIHMDYHLFGSRTLRPKQLIVPCPIGVCRSPSGRTSKWKWQKRSEILGWAISLTLTNLPIAVEDHNSFSLDFLHEKGILEDVRMMASLNPSRIEVPYFFRPNEMALDLLAHDRLFLVAPLNSFSLLRSRYTTVEPYFVPWSGAPLAWCLFYLEERNQIDSLIVDEICLDDTLSVNTYVDTDSMSCRCLSCKTEEVLGERFSLNTNDLDFLCSLGSIETVYDSEHAL

SEQ ID NO: 686 - DNA, 4845 bp, Tomato brown rugose fruit virus
  source 1..4845: mol_type = other DNA
atggcatacacacagacagctaccacatccgctttgctcgacactgtccgaggtaacaataccttggtcaacgatcttgcgaagcggcgtctttatgacacagcggtcgacgagttcaacgctcgtgatcgcaggcccaaagtaaatttttccaaagtaataagtgaggaacagacgcttattgctactagggcatatccagaattccagataaccttctataatacgcagaacgccgtgcattcgcttgccggtggactacgatccttagaactggaatatctaatgatgcagatcccgtacggatcactcacatatgatataggtgggaattttgcatctcatctgttcaaaggacgggcatatgttcactgctgtatgcccaatcttgatgtccgcgacataatgcggcacgaaggccagaaagacagtatagaattatacctttccaggcttgagcggggcaacaaagttgtcccaaatttccaaaaggaagcttttgacagatacgctgaaacgccagacgaagttgtctgtcacagtaccttccaaacgtgtacgcaccagcaggtggaaaacacaggcagggtgtatgctattgcattgcacagtatatacgatatacctgctgatgaattcggagcggcacttttaaggaaaaatgtccatgtttgttacgccgccttccacttttccgagaatttacttctcgaagattcacacgtcaaccttgacgaaatcaacgcgtgtttttcgcgtgatggagacaagctgactttttctttcgcatctgagagcactttaaattattgtcatagttattctaatattttaaaatacgtgtgcaaaacttacttcccggcatctaatagagaggtctacatgaaggagtttttggtcaccagggttaacacctggttttgtaagttttctaggatagatacttttttattatacaagggggtagcccacaaaggtgtaaatagtgagcaattttacagcgcaatggaagatgcatggcactacaaaaagactcttgcaatgtgtaacagcgagaggattcttcttgaagattcctcatcggtcaattactggttcccaaaaatgagagatatggtcatagttcctctattcgacatatctctcgacaccagtaaaaggacccgcaaagaagtcttagtgtcaaaggattttgtattcacagttttaaatcacattcgcacttatcaagccaaggcacttacatactccaatgttttatcctttgtcgaatcaattcgttcaagggtaattatcaacggagtgactgccaggtctgagtgggatgttgacaaatctcttttgcaatccttgtccatgacatttttcttgcatactaagcttgccgttttaaaagacgaattgttaatcagcaagtttagtttggggccaaaatcagtaagccagcatgtatgggatgagatttccctggcttttggaaacgcatttccatcgatcaaggagagactgctaaatcggaaactaattaaagtgtcgggagacgcattagaaatcagggtgcctgatttatatgtgacttttcacgatagattagtgactgagtacaaaacatcggtggatatgccagtgcttgatatcagaaagagaatggaggagactgaggttatgtacaatgcattgtctgagctatctgtgctcaaggagtcggacaagttcgacgttgatgttttttcccggatgtgccagactttggaggtagacccaatgactgcagcaaaggttattgtggcagtgatgagcaacgagagcggactgactcttacattcgaacagccaactgaagcaaatgtcgcattggcacttaaagattcagaaaaagcctctgagggtgcactagtggttacttctagagatgttgaagaaccatccatgaagggttcaatggcaagaggagagttacaattggccggtctgtctggagaccaaccagagtcttcctatactcggaacgaggaaatagagtcattagagcaattccacatggcaacggctagttcgttaattcggaaacagatgagttcgattgtgtacacgggccccattaaagttcagcaaatgaaaaactttattgatagcctggtagcatcactctctgctgcggtgtcgaacctagtcaagatcctaaaggatacagctgctatagatctcgaaacccgtcagaagtttggagtcttagatgttgcgaccaaaagatggttaattaaacctttagccaagaatcacgcatggggcgttattgaaacacatgctaggaagtaccacgttgcacttttggagtatgatgagcatggagtggtaacttgcgacagttggagaagggtggccgtgagttctgagtcaatggtttattctgatatggcaaagctcagaacactgaggagattattaagagatggtgagcctcatgtcagcagtgctaaagtcgtcctagttgacggtgtcccgggttgtggaaagacaaaagagattctctcgaaagtaaattttgaggaagatctaatcttagtaccgggtaagcaggctgctgaaatgataaagaggcgtgctaatgcgtcaggaataattcaagccacaagagataatgttcgtactgttgattcatttataatgaattacggtaaaggaacacgctgtcagttcaaaaggttatttatcgacgaaggtctgatgttgcacactggttgtgtgaattttcttgtttctatgtctctgtgcgaaattgcatatgtttatggagacacacaacaaattccatacatcaacagagtatccggttttccgtaccctgcacattttgcaaaaatagaggttgatgaggtggaaactcgcagaactacgctgcgttgtccagccgacattacccactatcttaacagaaggtacgaaggatatgtcatgtgtacatcgtcggttaaaaagtcagtttctcaggaaatggtgagcggggccgcaatgatcaatcctgtatctaagccattgaatgggaaagttttgactttcactcagtctgataaagaggcgctgctttctcgaggatatacggacgtccatacagtacatgaggtacaaggtgagacatatgcagatgtgtcgttggtcagattgactccgacacctgtatctatcatcgcaggagatagtccgcacgttctcgtagctttgtcaaggcatacccaaacattgaagtattacaccgtagtgatggatcctcttgtaagtataattagggatttagaaaaacttagttcttacttgttagatatgtataaagtagatgcagggacccaacaattacaggtagactccgtgtttaaaggttctaatctttttgttgcagcaccaaagactggagatatctcagatatgcaattttactatgataagtgtctcccaggtaatagcaccatgttaaataactatgatgctgttaccatgaggttgactgacatttctcttaatgtcaaagattgcatattggatttctctaagtctgtggctgcaccgaaggatccgatcaaaccactgattccgatggtacgaacggcggcagaaatgccacgccagactggactattggaaaatttggtggcgatgatcaaaagaaactttaattcaccggagttatcaggaataatcgacattgagaatactgcatctttagtagtagataaattttttgatagttacttgcttaaagaaaaaagaaaaccaaataaaaatgtttctttattttgtagagagtctctcaatagatggttagagaagcaggagcaagtgaccattggtcagcttgcagattttgattttgtggatcttcctgccgttgatcagtacaggcatatgattaaagcgcaacctaagcagaagctggatacatcaattcaaagcgaatatccggccttgcagacgattgtgtatcattcgaaaaagatcaacgcaatcttcggtcctttgttcagtgagctcacaaggcaaatgctcgaaagcatagactcaagtaagtttttgttctttacaaggaagacgccagctcaaattgaggatttcttcggagatctcgatagccatgtccctatggatatcttggagttggatatttcgaagtatgacaaatctcagaacgagttccactgtgcagtagagtatgaaatatggagaagacttggattagaagattttctgggagaagtttggaaacaaggccacaggaaaactactcttaaagattacacagctggtattaaaacgtgtttatggtaccagagaaagagtggggacgttacaacattcatcggtaatacggtgattattgctgcttgtttagcttccatgttgcccatggagaaaataatcaaaggtgcattttgcggagatgacagtttactatacttcccaaaaggttgtgagtttcctgacatacagcatacagccaaccttatgtggaatttcgaggctaagctattcagaaagcagtatggttatttctgtggaaggtacgtgatacatcatgacagagggtgtattgtttattatgaccctttgaagttgatttctaaacttggtgctaaacacatcaaggattgggatcacttagaagagttcagaagatccctttgtgatgttgcaaattcgttgaacaactgtgcgtattacacgcagttggacgacgctgtgagtgaggtccataaaaccgcacccccgggttcgtttgtatataaaagtttagttaaatatctgtccgataaggttctttttagaagtttgtttatagatggctcttgttaa

SEQ ID NO: 687 - DNA, 10923 bp, Celery latent virus
  source 1..10923: mol_type = other DNA
atgagcaagagaatatatacgattattgttgttttgtgctttcaggtttgctttcaaaatctccgaacacagcctacacaatcttcacataccttctcaacaaatccggcgatccccggtaccgacgctcttcaatttgaagaaaacgcaaacttaacttactctaccataaaatacaatattttaaagtttaatttaaattacaaacaatcaatcatgtctgtggtctctttcgggtcaatcacgagcatggacttcgatgctgcatgtctagcagctatgatcgaaacccctggtggctctattccaccaactccacaatcaccacccacttcaccagtggcggtgaaacaaaggaaaattttaaattttccaattgccaaaatcaggacaactcctgatgcatcttttgagatgtgtgtgaagttccccgagagcttcattgattccttctgtgctcaagcacagaaagaattaaaatattggcacgctgctattacgcagttgaaattctttggtggtgagacaccaaagactcttgaaaccttggtgaaccaaggtcaagctcacactcaccaagttattttaaacttggttaaaatccttgatagtgctccaaaagcaattcaaggaaagaaggagttggaaaatttcttccagctgagcccacatggaaacaattccaaagaaccaattgacgttagtcgaaaggtttatatggaaccgtgcaaaataagtccacgcaagcgacaagtgtgctcctgtgacaatgacgatgatgcacattatcattgttactattgtgatattgtgtgttcaagcaaaaatctattgcaagaacacgaaagggatttttgcgaggatgcacagtcagtgcaagcatttgggtataaacttgagagtccaaatgtctttgacccaccccatgtgacgcagcaaaggagtgttgcaccatctttgggaaaaactttggaatctcctgtgaaatctccagagcagtcaaagccaaacctggagaaaagtttcccactagtggaatcttccaccaacagtggcatgatcttctttggatcaatagctaccatggttccgtctcatattgaaaaatatgtgaggaattgtgaaactgagaatccgattgatgcagctgcatcaaatttggcgatgcaagaagctaaaagctctggcgctccttgtatagtagtgcatcataaggcactaccaggtggaaagaaagattttctttttcctcataactctcctcaagttgtgagaactgaaaccgaagagccaattgctggtaccattgatagaccaacaataaaacgtgctttatttacccgcattaagaagaaagcacaagaaatttgtgtgaacccagggggaaccatccagagaaaaacaaagcgatggttgcggccagcggaagttgcacaaattgtgcgagctacctctgatccacaacatccattgttcaaggtggacgttactcaaattattgaagttgttcatcctgtttataggactgaaagaactgaagttgtgcagcaatgcataacaaggggaacgtacaaattgatgtctaaagcccaacaacggaaggcacgagcaatgcgctcagctggaatgttagtgatcactgataacccaacaacgcattgggtatctgaacctcagaaaatgctagtggtaaaggaaaaactgagcacaacaaagcatgtgaaactccggaatgttgaagtgaatgctgaatctgaaatgttttggggaactaaaacaaaggagggaccctcgaaaacagccttaaagcgctgtaagcgtaacatcgatcgcttggctcttcttgatccgcaaatgggtgagtctgcgaatggtgaatgttggatgaacacctttaagcaccatttaaaagtggggagcattgatattcttccaaataaggttcgtttaccaaaccttaggtcggcattctcacgatggatacctttggttgattatgttgaaattttgaaatttcattgtaagtcacaaccaaagcttaaaagggttgtgatacctactccagttacttatctggaaggttctagatatcacattcatgttggttatagcaagaactgctcatggattacggtcgaacaactaattaggcaattgcagactctgttaacatcatccaaatatggagaacattttaagagagcaattgttggtggtgaaccggaagacaaattcacaccagtggttcctatagttgacgtggaaactgagagagctaaatctagcttggcaaaatggacaactgcgcaacagagatatatgggatctattagaacccgaatcaactcacaagcagaaaaacataaaatcgattcggaaaaaaagatctggataccaatgaggcacgacacgatggatatgttaactccaccatatcttttcgaaaatgggctgagaaacaacgaagttcaacaagtcggccaggttcttggagattctgtagatcgtgctggaaacagttcaggtcagagttctcaatgccaacaacaaaatgtggcgcttgcatccgaaggaaacaacgacaacgtgataaacgagagcgtgcgcagcattcaaaacttagttactgccaatatgcagttgcaagagcaatgcaaattgttgctcgcctcacacgaacaagctatcatggactccgtagaacacggaaacttggagattcagaagcacgatgtagaggtctcgcagaaaccatcaacgaggaaaagcgactcacagaggaatttgcaaaaattctcattgaagaaaatagtcgcctcagaagagatgtcgagaacattgggcagaggatggagaaaatctgtcacctcaatcggtgttccaattgtgagtgcttccattgcagaagctttaaatcaagtcgttcaaaggggaaatacttcctggcttgatgtaggcatttctggaacattgttgaagcaatgtactctttttgctacgagaacttttcaagcgtattgtagctacaaattagcacgaaacgtgctgacattaaccgtgggagaattgtatgataatgtgaaatcatacatcaactctataatgggttccacagatcctgaagtgactggtttcttgtcgcaagtacgtagcgcaccttcaatggtgaagatggccattttgctcacaatgtttgctatctcggtgaaattaatgagaaaattcttcaaggtgaagaataatggaactagctttactgtaagcggagagaatgtctctgcaagccagttgcgaatctcagcacaggctcaagctcgatcaactgacaacatgaccccaactgtaaagaagctttgtagcattcttggaatgattggtttggtttgttgttgttacgatagaacaacatgggcatatcaaaaggattggatggatgcttggatcacaagtatcacatatgccggtgcatctgatagtatttgggaatcaatttcccatccatttgaaacattgcataacattgcagtgagtggaggagatcgttcaccagaaactacagctcgtttggagcgaattttggctggtgcagggttgaacgcacaagcccaagcacttgatgaatttggagcgtctagctcagtgatgggtcagacactgcaaaacatattggatgaggttgaaagtacaaatgtgtcaatcgttagtgaaatgaaagcattgccacactaccaccgaaatgccactaccttcaatcaagcggctcgtgatttagtgactgaaccagatgcaacatatcaaatgttgttaacagcagcaactggtactggaaaatcaacgcttttcccagtgcacctaaggtcacaatctcaaaagagagtcttgctgctcattcctctcgttgcagcaacacatggagtttaccagcgacttaaaagtcaaagggtgaatgatattggttaccatgctgattcaatatctgaaaacccaaatgctaaattaatcatctcaacatatggacacatgtgtgtgaaattacttggtggtcaaaacccttttgatcaatttgattatattttagctgatgaatgtcatgttgtaacactcgagactgttacagtgatatcccatttactccaacagcgagaaatggcgacgtggaaaacagttttcatgacagcaacaccattcaacaatatcacacttaatagtgttgagacagaacagcctgtaatcatgcaacagaccgagcatttccacaaccccaaaagctttgtagattttctaaaagctggcggcactgaaagagtgcaaacatatgctaagggaggctgcatcgtattctgttctacccaaaaagaaactgaggaatcagcgaaagctcttaaagcgagtggggttattgcactcttttaccatgcctctaaccgattggaatgggattcctttgcaaagaaaaatgagcgaagcatgggacaattaaatttttatctctttgctacaaatgcactagaatctggtgtgacgatccctatgaaaagttgcgttgattttgtaactaaaatgcatccagtagttggtggagataggaagactattactatggctccaacttcaattagcattcaagagcaattgcagcgtcgaggtcgagttggacgaacttgtccaggtgggtatctatacacatcagttggaaccccgttgatgtataaacttgacccagattcatccattaagtacttgttgtactgttggaagagtggtatcaaatgttataaggaagcattaaatattcctgatgaatgcacgataacattcactaaagagaaaattggtgctatttggacacatgacacaccgccagttgttacagcagccttagtggataattttggtgcagtttacaggaatgcaaacttcttcttagcatcacatcgaagaaattatgtggaaattccacatacaactgatatgattctgccctcaactctctcgacatgggagaattttgaattggatgggaatgaagtatcagatggcacacgaatgagagtaccacaaaatcatttctttttccgaaacgaaagggtccaagagagttggttgaaattgcaagctgcaattcttactgaactaactgaagcagaagccactaagaagcgagatatagttatcgagaatctgatggcgcgtcgagtatcgggccatcctgcttcgaagcttgaaatagctagaatgataatggccaaacaacaagtggtacaacaagcaagagacacgaaacgtgttcgagaaacccttagtgagagtatatctgattactccggcatcttctcaaacttttctggaatattttcagttcaagaaagattgaaaaaggcttctatcaaggctaatgaggaattagatatggttattcaggaaaatgaatcccatattttatttctacaagacatgataaaagaaactcctgagatcatccctgatatggctttagaggagcagatccaacatatggaatatgcaaaagccatattggaaaatggttggatcagtgggaatcctcaagcaaagcttctcattatgcgcacaacgcataaaaattttcatgatcttgttacaaaaaccaaggatgggacctatcgcatgaaatcatatgtgcaacgcatgttcgattttgtgaagaaacatccattgttaatttttatgtccattatgatgggaacgtcattagcagcaggatacttcatgatgagtaaagactctgaagatgacgatgcaatagtgcaggacaaggttttcaaacgcaatgataaggcaatgctggaatggtgcttgagaggcaaagcatgtaaatgtgacgccacacacttcgaggcacagtatgtacttgattcacgtcattatagaactattctcgaagattgggtaaagttcccattgcgagggttccacaatatacaaatagtaaactatggcacagtgagcaaatatgcacgtgctctagctttcctatcagtttgtgcactcttagctaacccgactatggtgtataatagcgcagcacattccatggctggaaatagtgagtataatgagtcagtagcaaaatccctaatgcacaatattctaagagattggaatagagtcccgctcatagacttattggtaaaagggatagatggaagtgatgatcgttatgatcagtacatacatgaattatatacaagtggaggcctaattgcatttgaatcagacactggaaagtttgaaggaaaaatgtctattagtcaatatcgaaaggatgctgctaaaggacaaacaaaacgtagtgcagcttcacggtcacgtgaagaagatcattatgatccgagatcatcaggtcgactcaagagtgggatcagacgagcatatcgtcaattctataatattgaagattctgatgtgcaggaaattatcctcacaaacaagaaaggagctccaattcttaaaattgggagtcttgatgaattgaaccaacatgttgatcttctaaaattctcagatccagaattgtatgagttgtatttacatgctcgagataaattggatcttgacgaacctgaaagttcaagcggcttcactggaaagtggggtgactatgcggaagatgatgaattcatgaagatgatatcagctttagattcgttaacaaaacaagcttcggaggaagcatttataccagttcaagtgaaacttcgagatgggcgaactgtccaggcaaatgtcgcacgttattggcaaaaagattatccaactggaaaatctgtgaagcaatgggctcaaactacttgggctccaccacaattcacagctcttcgagaaagggtaggaaaagctcttgaactgattcctgaatcgcgaccaattcatcttcatggaaaagtcccaaatggaacacttatagagttccaagatgcaatgaaagatctgcacgagaagacagcagtcaaggctgtagctgaggctaaaatcggagatactcaatttgaggcggatccttctgatgtaacaagccgggttggtgtggttatggtgaaaacatcagcaaacgctgaatgggaatcatggaaccaatgtgttgctttgaataacatagtgatttttccccatcattacacgcttaaagatggtaataatttgagattcaagttttcatcaagtgatttcgaaagcacctgtcacattgtggatgggtacaatgggcttgacatggcttgggctccaattaacgttaaaattcgtggtttgaagaagaaagtttgtttaggcacgccgcggaatggatcttacctatggcatttttccatgattaatcaagggaaagatttgccagaggctcgtcttatgggatactcctctgtaacgaaagtacaagaagagtcgcacccatccttcgattggacacatacagtctcaacgcaagttgggaactgtggtggaccctttgttgataaacatggtgtcattgttggatatcacactggagcttttcaattgggacaatttaatactttcctgggattatcagcaccactaattgcacatctgacaaaattggatgtcaaaccaagtgcccagccccaatcaaagatgatttggagggaagtggatttttatcgatcaccaaattacttacccccaaccattaataaccaagagccaattccagaggagtggagatatccagaaggtaaatctgtttacccatgtgttgatccaggatggatgggttctcgtttggtgaagggatcaggttttcgtctcattggaaaaatgcaacgtcatgtggaatattcaacgaagatttcccttaatgagcattttgacatgtggatgtctcaagagaaaactcaaaatgagttaactaggctgaacaaaaatcgtgtagagaaagggttagagaaagctttcatcagtcacacgatagcagctcagaacaaggaagctgcaattaaagatacgagcaagtatgctagaacaacgttgggaacatattcagaacctttgttgaaaagagcgactgctctgacaatccaaatgctcgaggagcatattaagctatgtaaacgccaaccactggatttagtctatggggatatggaatggaacacagcatgtggagcccagtacaatggattgaaatcagcatttagggatcaagttgttggcatcgagaatatggatgcttatggtcaatactgctgggagcgtttcaacgttccaaccgatcaatacaaaccatgcatttggacaaattcattgaaggatgagttacgaccaattgaaaaagtgaaggagaataaaacgcgcactttcactgcagctccaatcgagtttgtaattggtgctaaacaagctgttgatgcattcaatcatcaattcatggatgcacatttgaagctaccacataccgttggtattaaccaatggtcagggggttggcacaaactatacaagaagttgtatggtaaaaactttgtgtactcaagtggagatggaagccggtttgactcaagtccgtgtttctatatgttcgatgccttgtacacaatacgtacatattttgcagatcctgaaatacaccaggttctggagaatatctacttggaggtttgtcacactccaatagtgttacacgatgggaatgttgtgatgaagaatcatggaaacaatagtggacaatgttctactgttgttgacaatagtctcattatgatgattctatgttgcgcctcttatctagagcacactccagctaccatgcattccctcgatgcaataaaaagccattggcatttttgtgtgaatggagatgattatattggaggaatgtcaccattgttagcaagccatttgactaaagagaagatggcaaaaaccttcagtgacttccagttcatatatgagtggtctgattattcaccatcattatttgaacaagattatatgagtttaaaattcataaacattgttgaacgaaaaggacaaacaactggacaacagttaattgctccatggcgtgaagcatcacgacaactctccactttggctcacacatcaagtggtgcacctgaaatcaaattacaagttgctctaaccgagagggtgaaagcatgggttgataaagatttatttgatttcataacagaatactgcagatggctcgtggagtatttcgatagatttacgaacacgcaagcatggaatgaagctaagaagttatggtgggatgaacaacaaattttcaaccattatttcagttttgaaagcatttgcaatgcgccatactcacaaattgtaaacgaaactcctgatgagttctttgctaatggtgtgagagagtcccgaccattgcgaatcctacgcgatggcatcaaatttggtgttgctgttacagcagctaattatctgggaccaagcgatcacgatgtacccatgattgcaaacacaatgcttaatgttgccaagataggtctcgcaaattcaacagccgagcggattgaccgtatgctatttgggaaggaaaaccctgaacatagtagagcggattcgctagttgttgtaaaaacagagcaaacagatgcgacgatctgtttgcgaactcactgcaaatgccaagcacagcacttcgatgggaaatatgagtgttgggtgagttccccatctgttgctataaaaatgtttgcaacattaaagccccggattctttccacaacgaaatttgttggagttaagtttctaccaaaaatactaagagctcatgtatgggccttatacctatctggattctcttgggaagaaacaatgcaaattgtgcaaagtcactaccctggcgagaaacagcaaagaaaagcggattggttcctacagcaactgctgaaagagctagtattgatattcaaagtgaaagggtcgaagtttattgagttgggagagcatgctcaagttcaagggaaaactcaactcgactctacacaagttgatatggatccaaattttaatgctgcagcttatgctgcaactcttcgaggaggaccgcactggggtacacataattcccaaggtctgtttgatgctattaaggtattaaaccccaatgcagcaaatgttgacattgggaatgcgcgaactgcggttcagcgcgagatgcagcggttgatagctgccgatgctccgcgacaacaaccaccaccacaagttggtggaggacaccaacaaccacctccagctggaggtcaaacgcaaggccagcctggtggttacacaccgagccaggcatttaccaataaatttggtaatataatggctgagcccgatgcccccctcgtgctcgactctcaagcaacaatgagggaagttgcccaaattgaggcagcttgggctcgtcttctagaggtgcaatctctagagggtcttggttccttctggaactacatgttttcctatgtgggaaacaatggcacctcatctggaggtgatcccagggattacatccctgcaggaaatgggcgagttacacttgcccaactaaagtccaaagctcaaggtgagcaatggcgacgttattggcgtagtcatgcgtcagacatgagggatttcttgaggcttcttcaagcttcagatagacctttgcctattcgttgggcaagaaacaatggcattaaagatgccaattacgagattgcattcgattttgcggatgcactcccagatctctcagctgcacaaatgtcaattattttagcagctaagaaccttgccgtaaggcgaggtcaaggccagatgcttaatgctggcaccaaggttggaggtcggtcaagaaccgaaacctatgaccaggctgtccgcgatgctgcggatgtccaattcccaggagcataa

SEQ ID NO: 688 - DNA, 6096 bp, Black grass varicosavirus-like virus
  source 1..6096: mol_type = other DNA
atggatactctggagcacgctgaagccaatgagctagaagacgatgattactttcttcctgacgaaggacctcttcatgatatgcacttggctagtgcaatcaacttggatcagatacaggagttgatgtatccagggactataaagtacaagatagatattccctattatttaagggatgagtacatgctgatagaaagtttgtgcaaaggagacaagatcaaaatggagcttggaatgttggctccatctttgaaactgtccaagcctggaggagaattgtcaaccatggatttacctgcatataaagaaataggaaaccttgtctgtcaggctttgaggaatagggacatcatgattcctatctccatgaatgatgtggcgctgaagctcccaggagtaatagtctacaggtcatggggtatagcatttgcagaattgttgaagattatatgcacaagagcagaagtgatgaggggagggtctcagcctgtatatcaaggcactggaattgaagcaggtgcagcacattgtcagtttcaagtcaacggcaattggtaccagatcgttgcgaggaagaatctctcaacactatatgacaggcaagagaatgtaatgtatataggaaatatacactcattgcttttgctaatggataccatcggacagaggatttgtttaatggttgccaatcagatagcagaactttatgatacacctggatgggttgatcaaggaaaaattgaccaaatattatcaactggagatgacattctggaagaaatgggaaatgatggatatgaaacaattgctatgtttgaatctcttgttataggaaaggtgttgagagcaactcccgatgacatcacagaatgccataagtttttgtacaactgtatggatgaggtagaaaacatgctactaaactctgctatgagaggaagaatcattgaacttgttcacagatggttggccatatttgacagtttatcgatcaaagagttatcaaatgtcttttgcttatatcgatgttggggacacccggttgtaaatatctatgaagggatggagaaagtttacgacatcggcactgaagagaaagaagttagcccatgggtagcaactgacatattgtgtcagttcagaaaaactttcttgataaattattacgagaagcatcactactatccaaacgtcttgatatcagaagaggtagaaaactcatatgttgctcaatgcattaagaagggttcttcaatagaggagatgtatcctacttatgatactaaggacttcttgggaatcgaaatccagaagatatgggacattccaataacatttgacctttgtcacattcttaatgataaagcagtatctccgaaccagaaggagctaacagacagtgttgtcaggtaccaaaacactacaggaggtcagaacagaagagggctccttagatggttgagaggaaagagcttaaactgcagagagttccttcgggagatagatcagaacgggctccctgaggatgagtgtatcattggaatgtacgagaaagagagagaaatcaagatcaaagccagaatgttttctctgatgtcagaaaggatgagatattacttcgttttgacggaagaccttatagctaagcacgtgctggagctatttcccgcaataacaatgaaagattcacaaaatgtactccaaaagaaattttggaccgttggcggaatgggaaaagactccacattcgacgttaatatcaacatcgatttttcgaagtggaattcgaacatgaggaatgaattaactcaacccatgttccaacagttggataagatcttcggatataccaatttgatatcaaggacccacgagatatttgaatcatcgtttgtatattcatcttcaggcaagtatgttcccactgtaaagtttggaaaactccaagaggatcctcctatggcatatcgtggacataagggaggctttgaagggttgagacaaaaaggatggactgtagctacagtatgtgccttatctgcaattgctgagagaagaaatgtgagaacaaaactgatgggacaaggagacaaccagatagttagaatactgatgcccacccagagatggaaatcaaatgagcttactatcaaagaaatgatccaaaatgccaaacagatccaaaaagcctttgtaaccgatatggagagaacatttgaagaggctaaattgcctatcaaggtgagagagacttgggcttctacgagactatttatgtatggaaagatgatcctacatgacggagatgcgatgccccaatggttcaaaaaagtgctgaggtcatacgctctaaccaatgagggtcaagtcactgtagcaggggtggtaggaactattgctactaacatggcttcagcggcaggattgagtgaaatgcctgatgtcatgtatctcatatttgtagcaatgactgagtggtcgctcggttacttgttagagtaccacccattcacacggaaatgcatcctaagagaacatgagtaccatgtaaagatccccggagcacatagaggaagagattatagggtgaggtcagttaacaagagaagattggtagtttctatgatcctgataccaacggcagctggaggaagtgtaacagttcctctccctggattcattatgaggggattccctgatcacgcctcagaggcttatgcctggatcaagatgcttgcggaagtaaagagtccatacaaaacaatgttaaagaactggtacactttcatcgggaatgattctatccaacctgatatgttgatccagagcccgtcatcaatcaacttcttgaagccgccaacacccagctttcaagggagaatgaacgtaagagagctcttattgtctggagaatttgatcagaaccagttcatcaaagaagcaggaacaatattgggagtctttgacaggaagaaggtctgctctgcgatgttaacagacccaatgaaccctttcataacctcagaggtttattccacttatgcccatgtgtacatagacggagtgataaaaagagtagaaaacaccagtactatcaagaagttggcccaaaaggtgaaaaccaagactcaagtcattaaggcaatgatgtacaatgaacataacttcatcatgttcataagttggagagcaatgaaaagaggtaccatcgactatgattgtgcaacccagcaagctagaatggctaggaatattggttggggaagaacaattactggtgtgaccacacctcatccagtagaattggggattggtcatatatgtaaaggtagacaagatgaatgtcctccaacggattacatttatgtcagaataaatgaaaagggagaatttgtcccttatcttgggtcaagaatcaagtgtaaagtcgtatcagagcaagatatagatgccagaagagagccactgattgctgtgggttcgcgtatatgcaggtactcgtcgtggcttggaattggcccaaatctgatggaaattgttgagaaaaacctagctgttgtctgtgacacatctgtctatgacaaatttatagacgatgatccaaagggactgttgtcatcaggatctattgatcatagattcactccagcaggagcatctgagggagttttcatcaactatgcaccacagattggttgtaatgtgtacatgtcgagcgattgtatgccgacctatggaagaggccagaccaactacactttgcacttccaggctctatattgttggctgcaatacatctcatcaaggagggctgaaagtgtattcatgcatcatcacatagagtgtgaagattgtgtcgtaccaactactgatgaagtccccgacatccagtgcccctttccctatttcgataatatatatcccccaagagtaagggacagcatatcaagagccttgggattcattgataggaaaggaggactagatattatgagcaatgtaagatcattgtgtcatgaagctgaaccaggcatgtttgatgttagacaattgcaaaagggagtgatgtggacactagcaataaagatcggatttcgattgtaccatgggggattattcgggtcagatgataccagagttgaggaccttcaggagtatcccaggatttactcatataaattatacagagataccttactggtcaatgtggcacatgtgatgatgatgcttgcagccatagagatggataaggcacctgatggtgaggaactcgcaaaagtcagaagaagagcaactgataaactgttgtcgaaacccattggaagcttcaaggggttaggaggattaactctaggaaggactgatgagaatccagataacagtcatttgtttatgactggctcattcccagaaactgtattctcaatattgaatacttccaagactgcattaatagagacaattggtcagattggacgcttatccatcgaaggaatgggccatcttcctgtggccaaaggttctctgtccaataagcagtttcgatttctgataatgatgagatgtttgttagaatgcaggaactctcattactttcaacactttcagaagatcccagaggacgaaccaggacatccagcggaccctcaaaatgacgtttatagaatgcttgtcaaaactcccgttctagatatgagtctagacaagatggtcaaatcacttgctgttattaacgaaagaaagactcttccgataatcgaatggaataacatctccttcgaatcaacagaagtgatctgcaggacaggaactcccaggtccatattcatcggaaatagaatgatcgttgagcaaaatagtagaagagagtacagagaagtaactcttccaacatctagcatttacaagtgggctgggatcttgtttcacaaacccttgaaaagacatatcattgtgttgggagatggaacaggaggaacctcactgttggtgaaaacattcaatcaagactctacagtgtacccttgctcctatttagaaacccataagattattccccaagatatggaatgtttaatgcctcaattgtctagaggatatgagggaatctccgggcgagttttgttaaatgttccagatgatatcaaggatcctctctggtcagaaagaatgtctagtgagataaatgacatgggcgttgaaaggacctctatagtctgcgatatagagaccgttgggctatgtgttctccttgatgcattcaggagtttacctcaaggagttcaagtagttatgaaaacctatgccaaagatatattgactaatatcatgtcaataatgggcttgaatcaggtagaggtgggattttctccgcatctgaaccagagcaaccatgaagtgtttctaatgggacacatctcacagaattcttttccagatcctgacatgatgatcaatcaaatggtaaagctttatggtaaggtgagagctgatccaagatccagaatcctggaggaaatgaggatgataaacaaagtattcaagccattaaagaatacgtctgtgtctctatctctagctcatataaataatctgggaattactatgaccagggagatattacaactggatggacttgagatctggggatatgcactgcaatttgtaaatcgtcattatgttgacccatctcatagagcatttcttgctgacaagaaaacgatgaacaggaaaagaaagagagatttgacaagggcattcaggatattgctaggagtggttgtgaatccaggatacctggatataaaacgcaaatggggtattagaactcccaaggaattcaaaccaagaggaatgaaccttatactagccagagattgtgatgatatgggtgtcaaattaaccaagaaggacaaattggcctctgaatgccttcattgcttttggaccaggaagatgaggaaagctcctctagatgcaccagatccaccgggggaagattggatggaaagtgcaacaagagttcgatcatttgccagcagtttatctgagcactcttctcatgattacatcaatgtcattgagacagagtag

SEQ ID NO: 689 - DNA, 7017 bp, Maize suscal virus
  source 1..7017: mol_type = other DNA
atggagacctttctagatgaacaatttgatgatatgctatctgaatttgagcaagcacggctgtctcggtttccagcctcacatcacagctcggctttaacatattatcctcaacgccatattctgtcattaatgtctccaaactgtcctgtgaaaccaactccccttctgcgggcatactgtgatgcggtcaataaagtatctgatctcttggggggtgggtgtgatgccacagacaacccagctccagtatactcttatatcttctctcagacaacggcttcttcgccagcctattatgacccagactatgaggatccatacctgctggattccctgcgagcagcctcagatgctgtgcttgaagatattgaagctatagaatctcatcatccgggtttttcgctggataaccagaagttgcgactgctgcggaaagtctcttcacgtctccatgcttcctgcaaacagatatttgcggtgcgaagaatgttagaaaaagttagaaatcaaatccagaaatgtcacatcggggttgatcacaagcttatgccagcagtgagattaggaaatttgagtatacacactgttagagatctcatcttcgtagccggactgcaaccattccccatgcgcatccatatactaaattacgatcagtggctaatgatctacgacacagtctgttgccgtgcaatggtaaaggtggcaactttatggaacgaggaattacgcactgacaatatcccttcatgggagatcgtgtcctcagtttataaatggggcgacgcacttttaaccaactatggtgtctcagcgtatgctattataggagaatttgaatcaatagtgactggtgtcttaattacgttttctgacactgacacactaggacttggtgcctcatttgtcaactcaataatggagaacgcgcaagagcaaagcagagcttataatatacctgcgaatgagacattgaagctgatatcattgcttagaactgttgagtctgtgaactggctgtcagagttgttcggtttgagaaagcattggggaaatccaatggtggacgcgcgagcatcgggaaaagcagttcaggagaaggtagatgaggtattgccagttaaagggactgcacttgtgaaattattggcatctttcaacaggatggttacactgtcattcatctctcagcatgggcaatggccggacggttactacctctcgaactcaagagactgcccgctgaaaagagccttcgaatcacggtctacccgtatcccagagactgtggaagggcatcgtcatgaagactgggcatgctttgtgtttctacccaactgcattttagactcatatgaagatgacctggcattaatatcagataaagctgtcagtgtgtaccgcgaacacttagattcagtctatgtgcgggctctctgtaataagcagagtcagggcacggttgaggaagacagaaggttgatgttagagtacttgaggaaacagcatatgccaatactggatattttcaaaatagtaatgacagacgcagtgccgccccgatggatggccaactgtgctagcatgaaaggaacagaaatgaagcacttgaaggcccgaatttttgcggtgcttacatatgagatgagacagtactttgctgcgtcagaagacatactgaagaacaacttatttaagtataacccgcatcagactatgactatgtcagaaacagagctattgactcgactaaaatcattaactactcaattggatccaaacagtcaaagccggcagctgagtgtaatccatattgttgatttttcgaaatggaatttgagaatgagatacactaatacatgcttggtattcaaatctatagacgatttcttaggaactccaggcttgtttgagaattctcatccactcttcagtgatatgctcaacatggtttcagacccattcaatcctccagcgttaggagtagaagagacagaatctgacactatttggagaaatcatcacgcggggtgggagggtcagcgtcagaagggatggacaatcttaacatctgcactcttgtctgacctggagagaacaaccggagttcatagtgaaatatgcggccaaggtgataaccaggcactactaagcaaatttcctgtccccactatctataggaatccggaagaatggatcaagagtgatcctacggaggttaggaaggtgcttgacgacttctatttgagattagaaaaggaatgtgaagctgtaggtctgaagataaaaacagctgagacctgtcgaagtctttgttttttcaactacgggaaaagactctatttcaaaggcagtgaactatccatgaccctaaaacggttctcaaaaaacataacccagcctaatgactcatacccaacaacagaggctattcttaagacatatgagggttcatcttatgcagctggcctttatagccatccaagtctgctgccatactggatgagtaaattctctgtagcccatcaattattcaacagcttcactaacaaccagctttgtgcagaagccccagtacagatgatgtccacctttgggttcccgatcaactaccgactgatcagcacgttgatgaagatcccagcatctctaggtggcccacctcagcagtgtctggctgattatctgctacgcggccatccagatccactatgcactgatttagtcgggttgacattgaagtcaaaggccgggtgtgtgatctctaagaagataattcgtctagctcaatctggtaaatggtttagccaacgcactctgaccagagattccctaatcaaatctccttattctctgaacctcagggtcccattatcagttcgacaaccaattgaagaggctgtgctcccggctgtgcgagctcactgcaacaataacttagtgaaatctctatttgatagctcgatggatgacgacgagagatatattcttgactctttaggtcttatgaagccgttccatccgctcgtggccaacgatatttattcaaggactttaccaggaagaagacagatgtttatatcaggactggcgaataccacgagcttaggtcgcctgattaaagggaattctgcgtttcctctgatctacaaagtcatggatttggagatggagcagctaaaaagctggatagtccagctaacagagcttctcggtttacctgataatgatgatattattcttcctcatcatatattagcgcaacagctgcgcgagaaatcgtggaatacagtcattgagggcataacagttccacatccgttagaacagttcatgcttactctatcaaaatcggacgtctgcaccaacgactgttatacagtagaacctgagcatattgtattggttcaacactccgaggatgtggttgtgtctcccggtgtggaccgtgaccacatcacagcagcgcggtcaaagaaagggagcccctatcttggcagccatatcggagaaggcattgtacagaagcagcttatttgtctaaatccagatacttcctggagagatgtcattagactaaacactatcaagcgttgggtggctccagaggggtctaggctgaggttgtttatgaatggaattataagctcgcggactaacatatctcgtgcctacatagatctcgccacaggcgttccgagtagattgtcttacaaccaccgggccagcctgatggggtcaataaacagctgctctatcagttcgaccacaaacatgcacacaaggttgtacttatcctcgaacagaatgggagattattctcatggtttgaaaaattatcacatgcctttcgggcccacctttctctgttatcagacgctcgtctgcttgatcgggatcttttcacctgagaaatgggcattccctagaaatgtttatcatattcatgtcagagactctagggtgccgccggtgtacgatggcgggttagagctagaagacctaactgtccttgatctgaaaggacacccgcctaccatccttaggtgcttagcctccaaactggtattcgaagcagcaccaggatatgcatcgttcggattttggtgtgagttcgaaacagcatcgaggactgatgcgaaatatgggtatgcccaacagctgacgggtggtttgttcattcaggagacggttgtaagagaatctataacacacgacaggattgggagctttgcatcgagaccggctgtcatatcaattggagacatctcattgatcgagccatctctattccttcgttccatcgcctggggtatgctgttgctcgcacctatgcatctgctgcatttcagaggcaaatatgcattcaaagtttcctgcgtggaatatgtcaatcttttcagccgagctttttggtcttcatttgaatccccaatgagcaacccccgaataattaggaagctcggaaagcatgtcgcgttgatgtctagtcatagtctaggtaggctagattccggcatcatcccagctctgcagataataatcgttgaagagatgtggtgtatcatacattcgatcgccacctatttccgtcgaggaggtgataaaccgaatatcccccccatctttgccccatcgggttctgctgccctactcctcacctcacgagtgatagaaatgatggtcactatacggctagtagttgggaactgcagcatcagtaagatagtagggttcccaagagatttctcggcaaatcttatgagtgtgccgcagccaatatctgccgcagctctgatcgtgatacaacatgacttcttagaattgcagcgtcacttgaaactgccattacgggacatggtgatacccagagtgttctcaacccattacccctgggttgatatcttaaggaagactgacagtgtggaggcagacgatgaagacccgcagaggcaattagtcctcccagtcgactttccgcagtgtgctaatgtagtagaatttcgtatccctgagaaccctgtgttggagactactccacaatgtgactgtaaaacgacacaaagaaagagagatttacatgatgaatgtttcttttcgctgagtgggaactatagcaaatcccacctcaaaattctggagttgatcttttcgttccacctgcctatagcaaatctctgcgtgcttggctctggcactggttctgaagcatgtgcgttaagtaattatctggactgcagacaggtttatgtgaattgctaccacaaactaactgacttctccccgcatgctgcttccacttatgttccgcctgcattcaggtctgatggtatagtgactaagctcgtctctccagcctctgctgtcctaagtctgtcagatctcacggacatcaggactgcggatgctatatatcagcacttaagaggtattgctacaactggtatcatttgcgatgcagagattccaagtgcagcaactcctttactctactcacagataatgcatacaatagtggcagttgtgaggaagaaagcctctatcaactgggtgttaatcaaagtgccgatcttctgtgttcataagcttcttggcctggcagctccactagctcaggccttccatagaatcatctttgcttatccagacttcgggaagcctcattcaagtttggtctatattgtcgctactattcgggctaaggcaactccaattgaagagaataggctgcctactgtaatgcttgaagacgagatgctcagagagatgttggcctctatcagcagtcagaaccattgtagattatatgagatgagggtagcggatagaataagtcggttaagccttaatctaacccttcctcaaagcttgactgtggcttcgaatcggtttgtgcaaggcctgatcctcactgaagacgaaatctccgacccggaacaagttataaaggtactgaaggctgtgaggcaagggttgttgacctcagcacagaaagtagttgaaactcatttccgagttcataatgaaatcacaatgccgaggtcagctgtcctctctgcggatttaggaacccttcacggacagttaaacaacacatacctgaaagtcgctaaatgtgatctgctgttagagctgttgcaccttattcatcctaccctcgaacagatcaagaatcgtgtgtacagctggttggctacagcccactcgtatagaatgagaaacaggaacttcaatgtctacatcaaccagaccagatttatatcacatgattctagatatttattcgaaatccttggacatcttatgaaaagatctgttcccacagttggactccccatccatatggattaccatttattcggatctaggacactgaggcctaagcaacttattgttccttgcccaataggcgtatgtcgaagtccatcaggtagaactagcaaatggaagtggcagaaacgaagtgagatacttggttgggcaatctcattaaccctcacaaatttaccgatagcagttgaggatcataatagcttttcgctggatttcctacacgaaaaaggcatcttagaagatgttcgcatgatggcctcattaaacccatcccgcatagaggtcccttacttctttaggcccaatgagatggccctcgatttgttggcgcatgaccggttgttccttgttgcgccgttgaattctttctcactactcagaagccgttacacaaccgttgagccatactttgttccttggtcgggggcccctttagcttggtgtctattttatctggaggagcggaaccaaattgatagcctgattgtggatgagatctgccttgatgatactctgtcggtcaacacttatgtcgacacagacagcatgtcctgtagatgcctgagctgcaaaacggaagaagtcttgggagagaggttttcgttaaataccaacgatctggatttcctgtgttctcttggatctatagagacagtctatgattctgagcatgctttgtag

SEQ ID NO: 690 - DNA, 2310 bp, Spinach latent virus
  source 1..2310: mol_type = other DNA
gctggtattcaactgagcttaaatacccttgtcgaacagattgattttttttaaatcgagtataagtataattccggtgatttttaataggcgtcagaaattccgatttcccactacctaattaactgtggattcagtggaagttaccgatttaaatttatccgagaactgattaaggaggtgtaggcttcgttgatctgtgactcaagaaagacgtgtgaacgttattctcacgcgtaacattggaatactctcgacttgtacgggaaagccttcataaacgccattcctcttggtgttgggttctgaagaggagtacctgttcgaaagaatcacctaaaatcgctggtgattgttactaccatggcactggtaaagactaaaccgcttgtgttaacagccgccaatgaagaacaattatataagcaaatttctggcgcgcttgaatctgtgaacaagaacatgaaaatgttcagagcctgtgttccgcttgagctgaagaataatggttatacatcattcgagctttgcgatggtgatacaagatctttggtgactgcttttaatgtcagagtccagaagaatttgaatgtagatcatccccacattttcttattgtgggtgcctaggattctgaagtctaccaccgccactgccattataaaatgtaagtatttggcaacgggtgatgagaaagcagttgggaagtttccgcttaatgaagccttcatctttgcctttggatgggaaagatccatcaggatgaaggatgcttacgatggtaaggggttacatttgtttattcaatgtttcgcccctaattctgaagcgaaggcccccttaggccgattggtcccaatgtgggacaattgtgccaccgctaaaatgcggtataccgaagatgtgggttcctcacttaccaccgcagatgaaatgcgtgtgagaaatgtgcttactgataaggatacgaggaatcttttgagatcatatatggctactgattcgcttgtaaagagcaagaagataagttcacaggtgcacctagggtgcaattgtctgatgatttacccgctacgttggattttacgcagcgtgaagtgcctgttctcggtagtataccgaatgctgccctttttaatggttcagttgttagtggaaatggtacggtgggagattgcgatgagtagaccgcaacctcaaaacgctccatagtgatgagttataaagttacgtgggatggataccctgatttgggtccccccgtgactgcttgtccgggaggaggttgtcttgggagtctccttctttaccgaaacgttatctataattcttcctaacaacaatgtctggcaatgctattgaagttaatggccagtggtattcaccggttactaacaataatgccccgtcacgaggtcgtggacgtggacgtggaccgactgctaggtccaggaattgggctcaatctcgagccaatgctgcccgatctagaccacaaactctagtgatcggaactatgccaactaatttaccaacctggaagtctttcccaggtgagcaatggcatgtagtttcaggcttttcgtttcctgatagatggaacaatggtaatatagcctatgcctcgatgaaaactgaactcgggaagattaaaaccctacatgaaatcacgaaggtttattccgtgatgtatgggtttatttgcaaatccgatggtcatgccggatttataaccggcttcgatacgaataatcccactggtcctgtcgctcctgacagggtgaaagtgaagaagaatgcttactgtgctaagcagcaagtgtttccagccggtactactgtttccgaactcaagaacgattggtctttcatttgggagttcgatgccgctcctgtagttggtactgaaaaacaagtcactgtgactcagttttgggtatcaactacaccgttaccgggagtgaagccaccaagtaatttcttggtgtgtgaggattgactacactcggacgattgttcgagtagaaatgtcattcctttttgccattgctcatgttgcccttttcactgtgatgtgataggatgtgtgtgcaatgatgccttcttttacgaagattagtgttccttcatggaacctggtaagaggtcctccgggatgtgctcagcacctagcttaagccaagtccatatgcccaccttcgctgctccgggtggatgcttatacatgctatggatgcctacatttgaaataatgtagatgcctaatactctctctcagggagagagtttagatgcctccaaaggagatgc

SEQ ID NO: 691 - protein, 218 aa, Spinach latent virus
MSGNAIEVNGQWYSPVTNNNAPSRGRGRGRGPTARSRNWAQSRANAARSRPQTLVIGTMPTNLPTWKSFPGEQWHVVSGFSFPDRWNNGNIAYASMKTELGKIKTLHEITKVYSVMYGFICKSDGHAGFITGFDTNNPTGPVAPDRVKVKKNAYCAKQQVFPAGTTVSELKNDWSFIWEFDAAPVVGTEKQVTVTQFWVSTTPLPGVKPPSNFLVCED

SEQ ID NO: 692 - DNA, 657 bp, Spinach latent virus
  source 1..657: mol_type = other DNA
atgtctggcaatgctattgaagttaatggccagtggtattcaccggttactaacaataatgccccgtcacgaggtcgtggacgtggacgtggaccgactgctaggtccaggaattgggctcaatctcgagccaatgctgcccgatctagaccacaaactctagtgatcggaactatgccaactaatttaccaacctggaagtctttcccaggtgagcaatggcatgtagtttcaggcttttcgtttcctgatagatggaacaatggtaatatagcctatgcctcgatgaaaactgaactcgggaagattaaaaccctacatgaaatcacgaaggtttattccgtgatgtatgggtttatttgcaaatccgatggtcatgccggatttataaccggcttcgatacgaataatcccactggtcctgtcgctcctgacagggtgaaagtgaagaagaatgcttactgtgctaagcagcaagtgtttccagccggtactactgtttccgaactcaagaacgattggtctttcatttgggagttcgatgccgctcctgtagttggtactgaaaaacaagtcactgtgactcagttttgggtatcaactacaccgttaccgggagtgaagccaccaagtaatttcttggtgtgtgaggattga

SEQ ID NO: 693 - protein, 282 aa, Spinach latent virus
MALVKTKPLVLTAANEEQLYKQISGALESVNKNMKMFRACVPLELKNNGYTSFELCDGDTRSLVTAFNVRVQKNLNVDHPHIFLLWVPRILKSTTATAIIKCKYLATGDEKAVGKFPLNEAFIFAFGWERSIRMKDAYDGKGLHLFIQCFAPNSEAKAPLGRLVPMWDNCATAKMRYTEDVGSSLTTADEMRVRNVLTDKDTRNLLRSYMATDSLVKSKKISSQVHLGCNCLMIYPLRWILRSVKCLFSVVYRMLPFLMVQLLVEMVRWEIAMSRPQPQNAP

SEQ ID NO: 694 - DNA, 849 bp, Spinach latent virus
  source 1..849: mol_type = other DNA
atggcactggtaaagactaaaccgcttgtgttaacagccgccaatgaagaacaattatataagcaaatttctggcgcgcttgaatctgtgaacaagaacatgaaaatgttcagagcctgtgttccgcttgagctgaagaataatggttatacatcattcgagctttgcgatggtgatacaagatctttggtgactgcttttaatgtcagagtccagaagaatttgaatgtagatcatccccacattttcttattgtgggtgcctaggattctgaagtctaccaccgccactgccattataaaatgtaagtatttggcaacgggtgatgagaaagcagttgggaagtttccgcttaatgaagccttcatctttgcctttggatgggaaagatccatcaggatgaaggatgcttacgatggtaaggggttacatttgtttattcaatgtttcgcccctaattctgaagcgaaggcccccttaggccgattggtcccaatgtgggacaattgtgccaccgctaaaatgcggtataccgaagatgtgggttcctcacttaccaccgcagatgaaatgcgtgtgagaaatgtgcttactgataaggatacgaggaatcttttgagatcatatatggctactgattcgcttgtaaagagcaagaagataagttcacaggtgcacctagggtgcaattgtctgatgatttacccgctacgttggattttacgcagcgtgaagtgcctgttctcggtagtataccgaatgctgccctttttaatggttcagttgttagtggaaatggtacggtgggagattgcgatgagtagaccgcaacctcaaaacgctccatag

SEQ ID NO: 695 - DNA, 7954 bp, Horseradish latent virus
  source 1..7954: mol_type = genomic DNA
tggtatcagagccatgagtattgaaaaatacataagatcttcggatcaatataacccaataacaaggttatacgaggtatatacgcatataccccggatcggcagcgtagagatacgttttgctaagtcatctacatacggtgtagaggacacatccgctaggatgagcatgtatactgccatcagatccgtttgatggtgcgcgtactaagtataactaagttatataattgttgaaaaacaaaatggatttatatccaaccaaagaggaagatacccctcaaaatcaaactgagaaatacgttttctcaaaagaagattcatctggatattcggctgaattaatggtcaataatgacttattaaaaactatttctaaaactaaattaactttagaaaaagaaaaagtttttagaatgacaaatcctttaacctcaatggttaaaagcctgtgtcagagaaagaaccacatattctattgcgtaactacgaaagagttatcaatagatatttgtgaatcttcaggtaaagtctacttacctcttctaacaaatgaagagataaatgggcgattaaccaaagtcgatccaaggatcagacaaacactctctattgttcatataggtgcagtgaagatattgctcaaagcgcaattcagaaacgggatcaactctcccgtcaaactcgctctcattgatgaccgaatcaatgaccgaaaagactgcctcctcggagcagcaagaggtaacttaaactacggtaaatttatgtttaccgtttatccaaaatttggtgtaagtttaagaactaaaaggttaaatcaaaccttaagctttattcatgaatttgagagaaataatttaatgaataaaggagataaagttatgaccataacctacttagtagcttatgcactaacaaatagtcatcacagcatagactataaatctagttctaatattgaattagaagatgttttccaagaaattggaaacgttgaacaatccgaattttgcattattgaaaatgaagattgtaattgggcaattgatattgcacaaaacaaagctgaattgggtaaaactaaaaagcttatatctgataatcaattaaaaattgaatcaggagaatctagtaatggtgaattacatagattaaatgaaagcgttaataaattacgcgaaaaatttgtagaaatttgtgggtagaatgagtgatctcaccaaacttccacacatctacaagaaaggtgaaacgatagttcgtttaaagccactggcaataaacaagaacgatcgggtatatgtgtttagctccgctaaatccaatatacaatcaatcaccaactccttgaataatctcaatgagattgttgggagaatactccttgggacttggaaaatcaattcattttttggattatccaaagatccctcagagtcaacctcaaaaaacccatctgtttttgataatgctaaaaccatttttaagagtgggggggttgataatacagcgttactaaaagaaatcaaaacccttttagaatcgcaaaacactaggattaaaaacctagaaaaccaatcgaaatccttgacggataagattgaacctgaacctttaaccaaggatgaggtaaaagacttaaaagagtcaattaggtttatccgagataagttgaaagacataatcggataaaactggcgaatctaaatcagattcaaaaggaagtatcccaagccttagaagagattaggtctctaaaaaaggatacagaagccattctagcaaaattaggatcaaccgaacctaacaacctagaagccattgccgcaaagataatcaatgacgttacgaaagtaatacgagattgtccttgtaacaaggaaattctggaagcttttgctaagcaaccagagaagaaaggtgaaataatcccttccaataaacctggatcttcttcatccaagttaaagaagtattcgtaccccaatactggagtaggaaactcaaacctaggtagttctgaaaaccctaaagcccttacctggccttttggatcatagaatgcctagaaccgtgggtcaaaccatagatgacttctggtcaaatctaggtgtaaaccagctagatgaacatgagttcgatcttatgatcaacctcatgaccgacgatgatgtatcctcggatacatcctttgatagtttaacctctctcttttctgagttattacaggttgaacaggaaatcacttcggaagaagaaagatgccaacttcttgaaaaagaagacagttctgacgaatccatacccaacgattctgatgaagaaagcgttcctgaacaagtcaggatggaaaaaggcaaaggaccggccaaaccatacgactacttcgacaacgaaagcagcgatatggaatatggagattacaatccatacggcagaagcgggcaaacaaacaaacccgcaagaacacgaccaaaattggccagtgaaacacttggacgaaatccaaggattctcaatctcgactgcaccaacagtctgagagacagaaaaagattagtagaagaatggggagccgaaatcagcctcaccatccaaactaatctagacgaatattccgaccctgacatggtgttactattaatggagcatctgacggccggaagtgtcaaatcgttcatcaagacaacgaaatggagtgaactatccggaggaatctatgaccttgtcatggaaggaattcacgtcatgtttcttggcgaacaaccaaatgaagctttcgacaaagctaaagaacaagcagcagcaaaggacaaactccttaagatgcagctctgtgatatatgttctctcgacacattcacctgtgccttcgagaaagcattatacaaactcgattccggagactttcctccaattatcgagcaatatctggcgaaaataccggaggtaggcgccaaagcccagcagcgatacaaagaagaagctactggagcaatgaaatacagtcttggatttgccaacaagattgttaaggaagaattgaagaaggtgtgcgagctcaccagacttcaaaagaaactgaagaaattcagaaaaacctgttgcaaacaggttgaagaaagattggaatatgggtgcaggcccatatacaaaaagaaatccaagcggaggaagcccaaagtccgcaaatacaaaaagtacaaaccctttaaacgacgaaagaagtttaaaacaggaaagtactttcggcccaaaaccgaaaagaaagtttgcccaaaaggcaaaggaaagaattgcaaatgttggatttgcaatgtcgaaggccattacgccaacgaatgtcctaatcgacaaacttctcagaaggctcacatccttcaagaagccattcaacttggtctccagccagtagaagacgtctacgaaggagaacaagaagtattcgttatcgaatacatagaagtttcagaagatgaaacctcaacctctgaagacgatggaacatctacttcagaagactcagattcagactgagcaggtgatgaacatcaccaacccaaactcgatttacatccgaggaaggctatacttctcaggatacaagatcgtggagctcgactgtttcgtagatacaggagcaagtctgtgtattgcaagcaaacacgtaataccagaagaaagatgggaagcagctcccagaaagatcaacgtgaagatcgccaatgaaagcacgatcacgctcgataagatatgtcgtaacctcgacatcatcattgccggagaacgattccacattgacgtcgtcttccagcaagaaagcggtatcgacttcatcatcggtaataacttctgtcaggagtactctcctttcatacagttcacaggacacattgtgttcacgatgaaagatcaataccaagtaccaatcacgaagctccgacgagctttcaagagaggaattcctggatttttagaatccatgaagaagagatcaacggctcaacaacctgaaccgctcaacatctctacaaataaaaccgtttcactttcaagggggaggaggtttggagaaaaactcagaatcacccaagaaaggatggtaaaaatcgaagaactacttgaaaaagtttgttctgagaacccattggacccagagaagtccaaaggatggatgcaagccagcatcaaactatcggatcccacgaaggttatcaaggttaaacccatgaaatatagcccaatggaccgagaagaatttgagaagcaaattcaagaattactggacctcaaggtaatcaggcccagtaaaagcccacatatggcaccagcgttcttagtcaacaacgaagctgagaaacgcagaggaaagaagcgtatggtggtcaactacaaagcaatgaatgatgcgactgtaggcgacgcatacaatcttcccaacaaggatgaactccttacgctcatcagaggaaagaaaatcttctcttcctttgactgcaaatcaggattctggcaagttaggcttgacgaagaatcaaaatccttaacggcgtttacatgcccacaaggacactatgagtggaacgtggtccccttcggcatgaagcaggcaccatcgatattccaaagacacatggatgaagcattcaaagtgtttaggaagttctgctgcatatacgttgacgacatcctcgtcttcagcgacaacgagcagaatcatcaacttcatgttgcgatgattctccagaaatgctatcaacatggcatcatactttccaagaagaaagcacagctcttcaaagaaagaatcaacttccttggcctggagatagatcaaggaacgcatagacctcaatcgcatatcttggaacacatccaaaagttcccagatatcattgaaagcaagctacagcttcaacgattcctcggagtactaacatacgcctccgactacatcccgaagctagctcaaatccgaaagcctctgcaagccaagctcaaggaaaacgttcaatggagatggactcctgaggacacattatacatgaagaaggttaaaaagaatctcaacggattccctcctcttcatcatccccttccagaagagaagctgattatcgagaccgatgcatcagacaactactggggaggtattctcaaagctattcatatagatttatctactaacgaatctattgaattagtttgcagatatgcatcaggcagcttcaaacctgctgagcaaaattaccatagcaacgataaagaaacgcttgcggtaataagaactattcaaaagttcagtatttatctgacaccggtaagatttctggtaagaacagataatacgcactttaagtatttccttaatattaattataaaggagattctaaaatgggtagaaatatccgatggcaaggttggttgcaaaactatgtctttgatgttgaccacattaaaggcactaacaattgcctcgcagattttttatcaagggaattcaatggagcttagcgcgtcttttgaaatccgtcaacagaaacgcgacacgcgtaaaagatgacaccatacacttgtggtgagaatcaataggccactgcctatataaacactctatcaccgatctgaaaaactcagatcctcaaaatggaggaaatagataaactcttacttcaagagaaaatcttattactagagctcgatctagtaagggcaaagataagcctagctagagccacaggctcgatgcaacaaaaggaagaaattccttgccgtgaaacaccggtaaatactctcacgagtaaattggttattatggagccagggcaatcgtccaaatctataactattccagagcaaacggctcatggtaaagaatcaacaaatccgttgatggctagtcttttgccaaaagagacaaaggtggtacagaccactagactggttaaaccagaggactttttacgtccaaacatgggtattccaatcccagaaaaagctgagcctagcagttcagttggtcctaacaggccagaaaaggagattcaaactcctcataacaactactatgttgtatataacggtccatatgccggtatatatgacaattggggttgtgccaagtctgcgacaaacggagttcccggagttgcacacaaaaagtttgccactattactgaggcaagaaagtctgcagacgagttcaccactgctgcaggaaaagataggcttaacttcgtccccaaaggcgaattagtcaagccaaagacttttgcaaaggccgtaacaagccctaaaaagtcaactcaatggatcactctcggaactaaaaagcctaagaaggatccagaaccaaaggagatcgcctttcaaccggagatcactattgaagacttccagtatctctatgatcttggaagaaaatacgatggcgaaggagacaccaccttcttcaccaccgacaagaagaacatatccatgttcaacttcctgaagaatgcagatccacagatgatctcggaatgctttcaagcaggactaatcaagacgatctaccccagtgcaaatctgcaggagatcaaatatcttcccaagaagataaaagatgcagtcaaaaaatacagaacaaactgcatcaagaacactgagaaagacatctttctcaagatcaagagcaccatcccagtctggagtgctacagggcttttacacaagcctaaatacatgatcgagatcggtgtctcgggaaaagttcgacctgaagaatctaagtccatggagtcaacgattcagaaggaagaattaatggaccttgcggtcttaaaggcgcaaacattcattgacagcctaatgaagatcaatcaacgcgaaaagatcttcgtcaacatggtagactatgaaacactagtctactcaaagaacttgaagaagacgactcaggaagacaggagcgtcatcaacaagtttcagcaaaagctgattagtggaaaaatccttggattccactctccagcaatctgccagcacataaaggtgacagcagaaaaagaagattgtgactaccactgcaatcagtgcgaatcttcaaaaggaaaggctatcgtttgcgataagcctgccgacagtggtccagccgacaatggagggccccagacacgtgaagacgcgtctgccgacagtgggtctcggacaacagacaccacgcactcagcaagtggatgaaataattcatctgctgacgtaagggatgacgatcaatcccactatcccaagacccttcacttctatataagtgaagttgcttcatttggagaaggcatctcgaaatctcaacacaactcgagctctcccttctctcttctttatctctctaaatgtgtgagtagaatcccgataagggaataggtagctacagagatcccggcctacgggccaattaaggggatctcctaaaatgtttgtattttcctttgtattatccagaaataaataaagaaaacctttacaaaaacccgagtgttctcccgcctttctctaaatctcatgtatctcaatagatactccgtctgaatagcaatcctccacgggacgctgtgagcctggagacctgatgccgtttgaagctgaagaagtaccgccgaggcagggggccgtttagggaaaaagtaagcgaggctggtttggcagcagtgactcaacctagggagtattcagatagacggaggtagatgaaagacaacgagaaaacaggaagttccgacggacactgttcaggtcagatttatttaaatctgttaatactctcattaaggagattaaccctaattagtggatctaaggggctacttataaacccttatcaatttaaaatcttgttaatcaagaaactaaacaagtggtttaaatgccacaaatcaaccttccgcagcacgaatctggtcgtgcaaaaat

SEQ ID NO: 696 - DNA, 2613 bp, Bean latent virus
  source 1..2613: mol_type = genomic DNA
accggatggccgcgcgattttttttatcccttgatcctacggtcgcccgcaattcgcgcttggtccatgtgaatgtgataaaaagtgaccaatcatgtttcgtttgacgagtctaattattgtttcttcgtccccacgtgatggaccaagtgctttatatatttgaattaaatgcttatcctctttaattcaaaatgcctaagcgcgatgccccgtggcgcacaatggcggggacctccaaggtcagccgctccgcgaattattcgcctcgtggaggtatgggtccaaagatggacaaggcctctgcttgggttaacaggcccatgtataggaagcccaggatatatcgggtccaaagaggacctgacgtccctagaggctgtgaagggccttgtaaggtccagtcatttgaacagcgtcatgatatttctcatgttggtaaggtcatttgtatatctgatgtcacacgtggtaacggtattactcatcgtgtgggaaaacgtttttgtgttaagtctgtgtatattttaggtaagatatggatggacgagaatattaaattgaagaaccacacgaacagcgtcatgttctggttggtcagagacagaagaccatatggcacgcctatggattttggtcaagtctttaacatgtatgacaatgagcccagtactgccactgtcaagaacgatcttcgtgatcgttttcaagttttacacaggttctatgcgaaggtgactggtggtcagtatgctagcaacgagcaggctattgttaggcgattttggaaggtgaataatcatgtcgtgtacaatcatcaagaagcagccaagtacgagaatcacacggagaatgcgttactattgtatatggcatgtacgcatgcctccaatcctgtatatgctacgttgaaaatacgtagttatttctatgactcgatttccaattaataaatgttaaattttattgaatgatcttctattacatgagttacatatggtctgtctgttgcgaaagcaacagctcgaattacattattaattgaaataacgcccaaattgtctaagtacaacatgactaaatgcctaaatctatttaagtaagtcgttccagaaactcgaatcaatgtcgtccagacttggaaatttagatacgctttgtgtagatccagagccctcctcaggttgtggttgaaccttatctggatgtggaatatcctcgtcaaggagaacggtggatcctctactcttgttatcttgaaataaaggggatttggcacctcccagataaaaacgccactctctgcttgatgcgcagtgatgggttcccctgtgagtgaatccatgattgaagcagttgatgtgtaggaagatcgaacagccgcactccaagtcgattcttctacgtcggactgccctgcgttttgcaaaccggtgctgaggtttgatagaggggggagttgaggaagatgaatttcgcattatgaagcgtccacgcttttagatgtgcattctcttgtctatccaagtagtctttataactcgccccctctcctggattgcaaagcacaattgatgggataccacctttaatttgaactggctttccgtacttgcaatttgtttgccaattcttttgggccccgataagctctttccagtgcttcatctttaagtattgtggagcgacgtcatcaatgacgttgtaatctacattatttgaatagacaaaagaattgaaatccaggtgtccactcaagtaattatgagaacctaatgaacgtgcccacattgtttttccagttcttgaatcaccttcaatgatgatactaataggtctctctgtccgcgcagcggcaccccttccgaaataatcgtcagcccattgttgcatatccagtggaacgttgttgaacgacgattgtggaaatggaggaacccatggttccgggggtttttggaatatccttgttgcgtttgagaccagattatgatattgaaggaagaaatgttgaggttgttcttccttgattatctgcagagccgcttctgcagaacctgcatttaatgccttcgcgtatgtgtcgttagcagattgctgacctcctctagcagatctgccgtcgatttggaactctccccattcaattgtatctccatccttgtcgatgtaggacttgacatcggagctggatttagctccctgtatgttcggatggaaatgtgctgacctggttgtggagaccaggtcgaagaatctgttatttgaacattggtatttcccttcgaactggataagcacgtgtagatgaggttgcccatcttcatgtgtttctctgcatatcttgataaacttcttgttaactggagttgttagacgttgtaattgtgataatgcctcttctttggatatggaacactgaggatatgtgaggaagtagttcttggcatttaagcgaaagcgtttcgggagtggcatatttgtaataagaggggtgtacaccgattgaggctctctcaaaactgtcataatgaatcggtgtatggtgtacaatttatactagaaccctcaatctcaatttctgcacacgtggcggccatccgatataatatt

SEQ ID NO: 697 - DNA, 2756 bp, Rice latent virus 1
  source 1..2756: mol_type = genomic DNA
atggcgaatttctctatcctcactgactcggcctaccctacggttccttcgcctccaagtcaagcggtgtcggccgggtttgaaggtgctctgacgacgcttttcctcgtcgttatcggctctctattgttcgttggcgtgttctatctcggctgggttctctgcgtgaaggacctcgtcctcaccttcaaggcccgccgccaaaggaggaccgaggagatcggtttcgggaacactcccgcgagggttgatgccaggggggtctaagagggcctcgtccgggaaagatggttcgaggccgaagcgtcgcaagggagagcccgaggccgcctttagggcccgcatattgggctgggcctcttcccagttcgggaggagggtctacggtggcgttggttcgtcgcagagtgctccgctgcaggtgcggacgtacaagtgggagaatccggacaagagtgccattgctatcgataccggctccatatggatcgtcaatacgttggacgctggtaacggggatgaccagagacatactcacaagactattatctacaagatgctgtttcagggtacgatgtggattaatgatgccacgtcggcagtctgcgggccactgacagttcatttctggctggtgtatgatgctgcgccgaagggggttcttcctgcccttactgacatattcgaggagggattctctggcctgggttcaacctgggtcgttaaccgggacaacgttcaccggttcgtggtgaagaggaggtggcagatgcgactgatgaccaatgggcagaagccgtactacactaaccgcagtgggaacggagatcccaccagtgtcacgatacgggacttcaggaagttcttcacgaagctgcgtactgcaacggagtggaagaactccgcaacaggagggataggggatataaagaaaggggccctatatctttgtgccatgtgttcgcaggcacctgaggggtccgctagagctattaacctgggggtgaagtttaggggccagagccgcatatacttcaaatgtaccggaaatcaatgataataaaacataatattttattcagattccatagatccgttattacaaggcagtacagtttgtacgacgaagcacagtatagcgacggatggagcactgtgcgtagcgtccggaggaggttggtagggcggtattagggaagaagggcaacatacaataccatacacacattattacacactaagcacccgaagggtgcttgaagaaactatccccttcatacatgtaatgtatcacgcagttgctttcgatgtacttggtctgagccggtgtacattgactcagccagtcttcgtcttcatttaccaggacgatggaggggatcccaccacttattaccttccgcttgccgtacttaggattgacggtgtagtcacggtgacatccgattagctgcttccaattagggcagtacttgaacgggatgtcgtctataacattgtattgtgcggtggggtcataagtggtgaagtccaccagtccgttccaatagttgtgcttcccgaggcttcttgcccaggttgtctttcctgttcgggttggtccgcatacatatagggaggtatatcttctggcggttgttggagcatcctggatgtcaaatcatggacgtgctgtagatattcggcagtagttacatcaagataatccatgttttgacgtgtttgtgtgtatacttcttcacataccgtgtatgtctttatgttctctgtggcccactgactcagctgttcgctgcaacgtagctgatcagtggggacagagcttgcgtatggagttacggtggtggggaagagcttctctgcgctgtactcgaactgggccagcctagttgcccagtcgaaggggaatgtctggcgtaccatagagaggtactctgttttcgaggtggacgaggagatgattttcctcatcttggtgtccttggtgtcagatccaggggccctcctcttgagggtcttcttgctgaacggtttggcgttgtagaattcgccccattctgcaatactgacggttcccggcttggtgatgtagtctctgacctgcttgcagttctgagcaggctgacagttaggatgataagactgatagtcaaaaaacctagagtctttggtctccaggcggttagatagctgtaaaagggtgtgtaggtgaaaggatccatctttgtgactctcacgagtaacaagtatgtagataggtacacgactgtggagcagagtaagaagatagtgaaggagttcccaaggatcaacaggacacttaggataggtgaggaagaagtacttggtccgtacgctgaattggtgggaagtggagggatcggccatgagtgaagcggagccgttggatttggctgaaagggacgtgcgggagaatcccggttgtccaaaggctgcttttcccacaaatctataccctagaccagtgcgatgtgggaagtgccttaggtgggaaccttgggccggctatttatatgggtgtcaaagtggctgtagttgggccttggcccactccagccgggggccggaaagcgaaatcgcactgatataatgttaccagtgcgatttctctttccgagcgcgatagcgcgaggcgccgggttccgcgtaccttctacgctgggtcgcctttatgtgtgatgggacgtaaggggggattcccattaatttattagtgcgctccatgacatcggggg

SEQ ID NO: 698 - DNA, 2843 bp, Rice latent virus 2
  source 1..2843: mol_type = genomic DNA
atgtggatggaaagcggacacctaccgcaggtagggtatcaggtgcaaccttctccgccggccgtaacctcgacgttcgttggaaacgacggcgcctggaggtttctcgttttattgaccgcttgttcttgcctagcaggggcagccgtattcgcatgctggcgcatgtgtggtaaggacttgctcctgaccttgaaggcgaagcgtagcaggacgataaccgagctaggtttcggccagacgcctgaacagcgtcgagctggaacgagttctcaaccagtgggcgtcatcggctaacgatcgaggtggagtctggtcttttgggtctggtcagcgtcccagttggccctctagcccggcacggatgccggcgaggactggtagcgctcgtcgtaaacggaaggatgattgggcgtgggattcggccactcgtcgccgtgttcgtccgaggacgtcttatgttccccgtggtggtccgcgagttcgcaggcctagcctgcagtatgtgaatccggggttacttggttccaccgcggtacatgtggctgatacgaatggggaggttagaattataacaggatactcgcgcgggagcgacgagcagtcgcgtcataccaacgagactataacgtacaagttatcactggacctctatgtcacggtggacacagagtgccagaaatatgttggtaaaggcgttgcggtcgcatggttggtctacgatgcgcagcctacaggagagatgccggcagcatcgacaatattcccccatgttgcggatatggctactgcgccctgtacctggaaggtgggtagggaggtctgccatcgtttcgtggttaagcgtagatgggtgatcacgcttgagactaacgggcgtgtagccggtacggtctttcagggtgctaatggtgtcccaccatgtaatcgcacggtgtacttccataagttctgcaagagactcggtgtcagaactgagtggaagaacacctccggtggttcgatcggagacattaagacgggtgcccctgtacatagtgttcgcggcagggaaccagattaattacagagttcagggggttgtaagaaagtacttcaagtctgtgggtaaccagtaaaacggttacatgtaaaatagtttgtaataaaatgtcaattttattcattacaatacaggtggctgcgctaagcagctgttttgcaatacatacacactttacccaattatccctgggcggcgcgcggcgataagggaaaggggtaaacactaaacacgagactgaccttagttaacatctttccggcgctgttgcgccggtgtctgatataaagctgaaattatatagactcatattaaatatgatgcagttgctctcgaagtacgagagctgttcagcagtcattgctttaggccagtcgtcgtcatcgttaacgatgacaattgaagggattcctcctttgatgagcttctttttcccgtatttcggattaacggtgtaatccttctgagctccgacgagggccttccagcaaggacagaacttgaagggtatatcatctattatattatatagagcttcgggatcatacatcccgaagtctacgttattctggtagtaattgtgtctgccgaggcttctagcccaagtagactttcctgtccttgatggtccgcagatgtagaggctgattggtctcgcctgcttgcaaagcatgtatcatgtagccatcgtagatctgcctcagcgtcagaatgaggatggagcaacgaatatacctgcggggttacatggtagatgttctcggcagcccattctgtgagtgtttcatggcaatgaaacatggagtcattgaacggtggttcatatgttaccggtggatcaggaaatagcttctgagaagcatactcccaggcttgcagcctggcgcagtagtcgtacggaaaccacttcttgaccccgttcatgtactccatccttgaggtcgccgagcgtaggatgtcagccattatctggtctttagtcattcttcgtcgcttgttggccagctcggaggaggtgttacctccctcggccgagctggaggaatccccagcagctctcctaatcgtcgtagaaggtccagcctctccattcccagtcggaggaactccgaatgatcctcggggccgaaaggagcccttatgccattctcctgtaggatgtttgagaatataagccagtacagctttagggtttcttgtaccttgtatatttggatgataatccatattatcaaaaaaacttgagtcatgtgtgcgaatgcgatgacgagtctgagcaagagcatggagatggggagtcccatctttatgaagctcagaagcacataaaacgccgtaaggcctgagcagattccagaggaataagcccattgtatgaggctcttggctacatcgtggataagtgaggaagacatttttgttctggaaggcaaagttatgtggttgctcagatgcggattcagtgttggtcatagggttccaacacttagccgcaaaaccgaactccggtgttttactctctagaaccctcttacaggcgatacccgaacgacccaggcttgggccaatttatagttggccggggtttctttgccggcccataccgaggccaaaggggatcgccaccgcataatattacagcgatcccctttgggccgaggggacattcgtgcgctctgattgtccccgaggccttcgcaattaagcatctactttaataaagtgatagtgaaattacgcggtattgcgtgttatccacgccctagtggactacataagtgaggtctttgggctttgttgg

SEQ ID NO: 699 - protein, 679 aa, Horseradish latent virus
MKPQPLKTMEHLLQKTQIQTEQVMNITNPNSIYIRGRLYFSGYKIVELDCFVDTGASLCIASKHVIPEERWEAAPRKINVKIANESTITLDKICRNLDIIIAGERFHIDVVFQQESGIDFIIGNNFCQEYSPFIQFTGHIVFTMKDQYQVPITKLRRAFKRGIPGFLESMKKRSTAQQPEPLNISTNKTVSLSRGRRFGEKLRITQERMVKIEELLEKVCSENPLDPEKSKGWMQASIKLSDPTKVIKVKPMKYSPMDREEFEKQIQELLDLKVIRPSKSPHMAPAFLVNNEAEKRRGKKRMVVNYKAMNDATVGDAYNLPNKDELLTLIRGKKIFSSFDCKSGFWQVRLDEESKSLTAFTCPQGHYEWNVVPFGMKQAPSIFQRHMDEAFKVFRKFCCIYVDDILVFSDNEQNHQLHVAMILQKCYQHGIILSKKKAQLFKERINFLGLEIDQGTHRPQSHILEHIQKFPDIIESKLQLQRFLGVLTYASDYIPKLAQIRKPLQAKLKENVQWRWTPEDTLYMKKVKKNLNGFPPLHHPLPEEKLIIETDASDNYWGGILKAIHIDLSTNESIELVCRYASGSFKPAEQNYHSNDKETLAVIRTIQKFSIYLTPVRFLVRTDNTHFKYFLNINYKGDSKMGRNIRWQGWLQNYVFDVDHIKGTNNCLADFLSREFNGA

SEQ ID NO: 700 - protein, 358 aa, Bean latent virus
MPLPKRFRLNAKNYFLTYPQCSISKEEALSQLQRLTTPVNKKFIKICRETHEDGQPHLHVLIQFEGKYQCSNNRFFDLVSTTRSAHFHPNIQGAKSSSDVKSYIDKDGDTIEWGEFQIDGRSARGGQQSANDTYAKALNAGSAEAALQIIKEEQPQHFFLQYHNLVSNATRIFQKPPEPWVPPFPQSSFNNVPLDMQQWADDYFGRGAAARTERPISIIIEGDSRTGKTMWARSLGSHNYLSGHLDFNSFVYSNNVDYNVIDDVAPQYLKMKHWKELIGAQKNWQTNCKYGKPVQIKGGIPSIVLCNPGEGASYKDYLDRQENAHLKAWTLHNAKFIFLNSPLYQTSAPVCKTQGSPT

SEQ ID NO: 701 - protein, 354 aa, Rice latent virus 1
MADPSTSHQFSVRTKYFFLTYPKCPVDPWELLHYLLTLLHSRVPIYILVTRESHKDGSFHLHTLLQLSNRLETKDSRFFDYQSYHPNCQPAQNCKQVRDYITKPGTVSIAEWGEFYNAKPFSKKTLKRRAPGSDTKDTKMRKIISSSTSKTEYLSMVRQTFPFDWATRLAQFEYSAEKLFPTTVTPYASSVPTDQLRCSEQLSQWATENIKTYTVCEEDAPTTARRYTSLYVCGPTRTGKTTWARSLGKHNYWNGLVDFTTYDPTAQYNVIDDIPFKYCPNWKQLIGCHRDYTVNPKYGKRKVISGGIPSIVLVNEDEDWLSQCTPAQTKYIESNCVIHYMYEGDSFFKHPSGA

SEQ ID NO: 702 - protein, 382 aa, Rice latent virus 2
MTNTESASEQPHNFAFQNKNVFLTYPRCSQEPHTMGLFLWNLLRPYGVLCASELHKDGTPHLHALAQTRHRIRTHDSSFFDNMDYHPNIQGTRNPKAVLAYILKHPTGEWHKGSFRPRGSFGVPPTGNGEAGPSTTIRRAAGDSSSSAEGGNTSSELANKRRRMTKDQIMADILRSATSRMEYMNGVKKWFPYDYCARLQAWEYASQKLFPDPPVTYEPPFNDSMFHCHETLTEWAAENIYHVTPQARPISLYICGPSRTGKSTWARSLGRHNYYQNNVDFGMYDPEALYNIIDDIPFKFCPCWKALVGAQKDYTVNPKYGKKKLIKGGIPSIVIVNDDDDWPKAMTAEQLSYFESNCIIFNMSLYNFSFISDTGATAPERC

SEQ ID NO: 703 - DNA, 2040 bp, Horseradish latent virus
  source 1..2040: mol_type = genomic DNA
atgaaacctcaacctctgaagacgatggaacatctacttcagaagactcagattcagactgagcaggtgatgaacatcaccaacccaaactcgatttacatccgaggaaggctatacttctcaggatacaagatcgtggagctcgactgtttcgtagatacaggagcaagtctgtgtattgcaagcaaacacgtaataccagaagaaagatgggaagcagctcccagaaagatcaacgtgaagatcgccaatgaaagcacgatcacgctcgataagatatgtcgtaacctcgacatcatcattgccggagaacgattccacattgacgtcgtcttccagcaagaaagcggtatcgacttcatcatcggtaataacttctgtcaggagtactctcctttcatacagttcacaggacacattgtgttcacgatgaaagatcaataccaagtaccaatcacgaagctccgacgagctttcaagagaggaattcctggatttttagaatccatgaagaagagatcaacggctcaacaacctgaaccgctcaacatctctacaaataaaaccgtttcactttcaagggggaggaggtttggagaaaaactcagaatcacccaagaaaggatggtaaaaatcgaagaactacttgaaaaagtttgttctgagaacccattggacccagagaagtccaaaggatggatgcaagccagcatcaaactatcggatcccacgaaggttatcaaggttaaacccatgaaatatagcccaatggaccgagaagaatttgagaagcaaattcaagaattactggacctcaaggtaatcaggcccagtaaaagcccacatatggcaccagcgttcttagtcaacaacgaagctgagaaacgcagaggaaagaagcgtatggtggtcaactacaaagcaatgaatgatgcgactgtaggcgacgcatacaatcttcccaacaaggatgaactccttacgctcatcagaggaaagaaaatcttctcttcctttgactgcaaatcaggattctggcaagttaggcttgacgaagaatcaaaatccttaacggcgtttacatgcccacaaggacactatgagtggaacgtggtccccttcggcatgaagcaggcaccatcgatattccaaagacacatggatgaagcattcaaagtgtttaggaagttctgctgcatatacgttgacgacatcctcgtcttcagcgacaacgagcagaatcatcaacttcatgttgcgatgattctccagaaatgctatcaacatggcatcatactttccaagaagaaagcacagctcttcaaagaaagaatcaacttccttggcctggagatagatcaaggaacgcatagacctcaatcgcatatcttggaacacatccaaaagttcccagatatcattgaaagcaagctacagcttcaacgattcctcggagtactaacatacgcctccgactacatcccgaagctagctcaaatccgaaagcctctgcaagccaagctcaaggaaaacgttcaatggagatggactcctgaggacacattatacatgaagaaggttaaaaagaatctcaacggattccctcctcttcatcatccccttccagaagagaagctgattatcgagaccgatgcatcagacaactactggggaggtattctcaaagctattcatatagatttatctactaacgaatctattgaattagtttgcagatatgcatcaggcagcttcaaacctgctgagcaaaattaccatagcaacgataaagaaacgcttgcggtaataagaactattcaaaagttcagtatttatctgacaccggtaagatttctggtaagaacagataatacgcactttaagtatttccttaatattaattataaaggagattctaaaatgggtagaaatatccgatggcaaggttggttgcaaaactatgtctttgatgttgaccacattaaaggcactaacaattgcctcgcagattttttatcaagggaattcaatggagcttag

SEQ ID NO: 704 - DNA, 1077 bp, Bean latent virus
  source 1..1077: mol_type = genomic DNA
atgccactcccgaaacgctttcgcttaaatgccaagaactacttcctcacatatcctcagtgttccatatccaaagaagaggcattatcacaattacaacgtctaacaactccagttaacaagaagtttatcaagatatgcagagaaacacatgaagatgggcaacctcatctacacgtgcttatccagttcgaagggaaataccaatgttcaaataacagattcttcgacctggtctccacaaccaggtcagcacatttccatccgaacatacagggagctaaatccagctccgatgtcaagtcctacatcgacaaggatggagatacaattgaatggggagagttccaaatcgacggcagatctgctagaggaggtcagcaatctgctaacgacacatacgcgaaggcattaaatgcaggttctgcagaagcggctctgcagataatcaaggaagaacaacctcaacatttcttccttcaatatcataatctggtctcaaacgcaacaaggatattccaaaaacccccggaaccatgggttcctccatttccacaatcgtcgttcaacaacgttccactggatatgcaacaatgggctgacgattatttcggaaggggtgccgctgcgcggacagagagacctattagtatcatcattgaaggtgattcaagaactggaaaaacaatgtgggcacgttcattaggttctcataattacttgagtggacacctggatttcaattcttttgtctattcaaataatgtagattacaacgtcattgatgacgtcgctccacaatacttaaagatgaagcactggaaagagcttatcggggcccaaaagaattggcaaacaaattgcaagtacggaaagccagttcaaattaaaggtggtatcccatcaattgtgctttgcaatccaggagagggggcgagttataaagactacttggatagacaagagaatgcacatctaaaagcgtggacgcttcataatgcgaaattcatcttcctcaactcccccctctatcaaacctcagcaccggtttgcaaaacgcagggcagtccgacgtag

SEQ ID NO: 705 - DNA, 1065 bp, Rice latent virus 1
  source 1..1065: mol_type = genomic DNA
atggccgatccctccacttcccaccaattcagcgtacggaccaagtacttcttcctcacctatcctaagtgtcctgttgatccttgggaactccttcactatcttcttactctgctccacagtcgtgtacctatctacatacttgttactcgtgagagtcacaaagatggatcctttcacctacacacccttttacagctatctaaccgcctggagaccaaagactctaggttttttgactatcagtcttatcatcctaactgtcagcctgctcagaactgcaagcaggtcagagactacatcaccaagccgggaaccgtcagtattgcagaatggggcgaattctacaacgccaaaccgttcagcaagaagaccctcaagaggagggcccctggatctgacaccaaggacaccaagatgaggaaaatcatctcctcgtccacctcgaaaacagagtacctctctatggtacgccagacattccccttcgactgggcaactaggctggcccagttcgagtacagcgcagagaagctcttccccaccaccgtaactccatacgcaagctctgtccccactgatcagctacgttgcagcgaacagctgagtcagtgggccacagagaacataaagacatacacggtatgtgaagaagatgctccaacaaccgccagaagatatacctccctatatgtatgcggaccaacccgaacaggaaagacaacctgggcaagaagcctcgggaagcacaactattggaacggactggtggacttcaccacttatgaccccaccgcacaatacaatgttatagacgacatcccgttcaagtactgccctaattggaagcagctaatcggatgtcaccgtgactacaccgtcaatcctaagtacggcaagcggaaggtaataagtggtgggatcccctccatcgtcctggtaaatgaagacgaagactggctgagtcaatgtacaccggctcagaccaagtacatcgaaagcaactgcgtgatacattacatgtatgaaggggatagtttcttcaagcacccttcgggtgcttag

SEQ ID NO: 706 - DNA, 1149 bp, Rice latent virus 2
  source 1..1149: mol_type = genomic DNA
atgaccaacactgaatccgcatctgagcaaccacataactttgccttccagaacaaaaatgtcttcctcacttatccacgatgtagccaagagcctcatacaatgggcttattcctctggaatctgctcaggccttacggcgttttatgtgcttctgagcttcataaagatgggactccccatctccatgctcttgctcagactcgtcatcgcattcgcacacatgactcaagtttttttgataatatggattatcatccaaatatacaaggtacaagaaaccctaaagctgtactggcttatattctcaaacatcctacaggagaatggcataagggctcctttcggccccgaggatcattcggagttcctccgactgggaatggagaggctggaccttctacgacgattaggagagctgctggggattcctccagctcggccgagggaggtaacacctcctccgagctggccaacaagcgacgaagaatgactaaagaccagataatggctgacatcctacgctcggcgacctcaaggatggagtacatgaacggggtcaagaagtggtttccgtacgactactgcgccaggctgcaagcctgggagtatgcttctcagaagctatttcctgatccaccggtaacatatgaaccaccgttcaatgactccatgtttcattgccatgaaacactcacagaatgggctgccgagaacatctaccatgtaaccccgcaggcgagaccaatcagcctctacatctgcggaccatcaaggacaggaaagtctacttgggctagaagcctcggcagacacaattactaccagaataacgtagacttcgggatgtatgatcccgaagctctatataatataatagatgatatacccttcaagttctgtccttgctggaaggccctcgtcggagctcagaaggattacaccgttaatccgaaatacgggaaaaagaagctcatcaaaggaggaatcccttcaattgtcatcgttaacgatgacgacgactggcctaaagcaatgactgctgaacagctctcgtacttcgagagcaactgcatcatatttaatatgagtctatataatttcagctttatatcagacaccggcgcaacagcgccggaaagatgttaa

SEQ ID NO: 707 - DNA, 38 bp, synthetic construct
  source 1..38: mol_type = other DNA
ccactggattcagcgaagttatgcgtaaaggcgaagag

SEQ ID NO: 708 - DNA, 20 bp, synthetic construct
  source 1..20: mol_type = other DNA
ctgagtccagctacgagcag

SEQ ID NO: 709 - DNA, 19 bp, synthetic construct
  source 1..19: mol_type = other DNA
ccactggattcagcgaagt

SEQ ID NO: 710 - DNA, 21 bp, synthetic construct
  source 1..21: mol_type = other DNA
aacttcagcgtcagtttacca

SEQ ID NO: 711 - DNA, 23 bp, synthetic construct
  source 1..23: mol_type = other DNA
  misc_feature 1: note = 5' 6-FAM 520 fluorophore
  misc_feature 10: note = internal ZEN quencher
  misc_feature 23: note = 3' Iowa Black FQ quencher
cgagggtgaaggtgacgcaacta

SEQ ID NO: 712 - DNA, 20 bp, synthetic construct
  source 1..20: mol_type = other DNA
cctgctgtccatctgctctc

SEQ ID NO: 713 - DNA, 20 bp, synthetic construct
  source 1..20: mol_type = other DNA
ctgagtccagctacgagcag

SEQ ID NO: 714 - DNA, 20 bp, synthetic construct
  source 1..20: mol_type = other DNA
  misc_feature 1: note = 5' SUN 554 fluorophore
  misc_feature 10: note = Internal ZEN quencher
  misc_feature 20: note = 3' Iowa Black FQ quencher
acaagactgacagggccaaa